United States Patent Application Publication US 2004/0216190 A1 - sequence listing, part 5

SEQ ID NO: 10625 - protein, 299 aa, Triticum aestivum
  Clone ID: TRIAE-23APR03-C5383_1.p
MSIFFMPRTESLCAVCDAHLGHGVDRGPPPPRRGPGFCPAARGLGPRLFPQGGATCILERPPAVPGRWYDLWPPRVPGLSRPALRLETPNCQKKNTSRWTSSMAVRCHAAATLVSSRAHLSSYLPPLLPSARPRPRTTRSGGGSYRRAAVRAMGAAPSSPSPSGQAPGKADNASLSDEELKKRLTKEQYYVTRQKGTERAFTGEYWNTKTPGIYHCICCDTPLFESSTKFDSGTGWPSYYQPVGDNVKSKLDMSIFFMPRTESLCAVCDAHLGHVFDDGPPPTGKRYCINSASLKFKPQ

SEQ ID NO: 10626 - protein, 344 aa, Triticum aestivum
  unsure (1)..(344): unsure at all Xaa locations
  Clone ID: TRIAE-23APR03-C53888_1.p
TPETTRSRNPRNKPPAKPASNPRAPIVLLSLSLSASAPSQLRRHGRARTXKRRRGGGGGSGEKKDLFHVVHKVPAGDSPYVRAKHLQLVEKDAEASIVWFWKAINSGDRVDSALKDMAVVMKQQDRAEEAIEAIRSFRHLCSRQAQESLDNLLIDLYKKCGKVDEQIELLKQKLKMICLGEAFNGKITKTARSHGKKFQVSIQQEMSRILGNLGWAYMQQNNYEAAELVYRKAQTIVPDANRACNLGLCLIKQSRHEEAVQVLEDVLLRRISGLDDDKAVARAEQLLRELGPTTHISSPFDIGLSFTEEIMERLDLVMNDWTPFRSRRLPVFEELDAFRDQMAC

SEQ ID NO: 10627 - protein, 513 aa, Triticum aestivum
  unsure (1)..(513): unsure at all Xaa locations
  Clone ID: TRIAE-23APR03-C538_1.p
MQHGSAVYAAPDPAGQYYPHHYGPRGPPLPSPGRGPAIPGASRRRRPLHPGGLPLRAAPRPSLIHPAQDARLPPHKPTPHPPEPALEPYHRFXEPTQGPARSEPSAHPADSGSAYKGTAGPQRDAAQGFRDAVSGGAWNKNGGTGLAHLRACSLRPTRPGXARETAASGGWDPPFDGQGPITAQGAGAWDVKLGCWRRLFLSRVLKTEIGVWIQHVDVCGGVGVHEVRVMLLPWGAGSPTDVLCQTEMDGIRMLDPSTSRTLRIYPLDTLTKWEVLDSTVFAIWAKTSVDFEAKRIRLKSNSYTSNTLLDTVTAATVQFKEIGEDARAKGTVDAGKSSIQSNEKKKGFDWMFAKPVDEVKDHWVPDEAAKKCQSCAGDFSHFNRRHHCRNCGEIFCDKCSQGRIALTAEDNAPLVRVCDRCMAEVSQRLSMAQEAANRSTTVQSHGDLARKLKEELERNRKSSGTASGGASGTRMREVACPTCTVHLQVEVPISGSETVECGVCQHAFLVSAN

SEQ ID NO: 10628 - protein, 217 aa, Triticum aestivum
  unsure (1)..(217): unsure at all Xaa locations
  Clone ID: TRIAE-23APR03-C53914_1.p
PSNHNFVDAERIEHGSPSWPPGELVNRRLWGLGGGSGRQAEHMGVLQASPMSWNGAPALGGTPGVLXRVRLLGPVDKYPNFNFVGRLLGPRGNSLKRVEATTQCRVYIRGRGSVKDSVKEEKLRDKPGYEHLNEALHVLVEAEFPADIIDVRLNQAVTILEDLLKPMDESMDYYKKQQLRELAILNGTLREESPSPHLSPSVSPFNSAGMKRPKTGR

SEQ ID NO: 10629 - protein, 512 aa, Triticum aestivum
  Clone ID: TRIAE-23APR03-C53935_1.p
MSPRTPVLFPFHFHTTSLRVVRGRASMDSSSEAPLLLSRGSEHKEVPDEAGGKRPWWREAAEESGRLAALAAPMIAVALLQLLMQLISTVMVGHLGEVALAGAAIANSLTNVSGFSVLIGLACALETICGQAYGAEQYHKLSLYTYRSIIVLLIVSVPIAIVWVFIPEVLPLIGQQPEIANEAGKYALWLIPGLFAFSVAQCFSKFLQCQSLIFPMVLSSMITLAVFIPLCWFLVYKVGMGNAGAALSVSICDWVEVIVLGLYIKFSPSCEKTRAPLTWEAFKGIGSFMSLAVPSALMICLEWWSYELLVLLSGILPNPALETSVLSICISTVVLLYNLPYGIGTAASVRVSNELGAGNPEGARLVVGVALSIVVCSAVLVSTTLLALRHFIGIAFSNEEEVVDYVTRMVPVLSISVITDSFQGVLSGVSRGCGWQHLGAYVNLGAFYLVGIPVALFFGFTMQLRGMGFWIVAWSRPRSQVTLLSVITATTKWDKMADKAKERVFEDRLPTQ

SEQ ID NO: 10630 - protein, 479 aa, Triticum aestivum
  unsure (1)..(479): unsure at all Xaa locations
  Clone ID: TRIAE-23APR03-C539_1.p
NSALIADWGIELSLLFDPKCPKLESLVEKIKEIVESNEVGRLPITPKGARDFGAGQMAIGERAYSIITGVSKVDGGAPHHSPVFXIEGRIAGXYGPDRKLAPVLTDQRGQLCXLSYDLIGPFARYDAMYXISAIXMLQVVKVYRCDNLSNXESENKRCWKQTADMEKMVNGWHGKMANEGHEXMDKVHNGDFEIKWNSRKIPNGMWEVCXLTCSDIRTSILDXDEPNKLTLEEXQQVQQEEPRLLVGMHEHVXQSVKIKTAXSDPLTTRRQEKTXTMLSHWTLYRLNMMSLISPVLEXAKGLDRISFDLSLARGLDYYTGVIYEAVFKGVTQVGSIAAGGRYDKLVGMFSNKQVPAVGVSLGIERVFAIMEQQEKEKNQVIRATETEVLVSILGKDLILAAELVNELWSAGIKAEFKLTTRVQNHIKYATQTGIPWMVLVGESELRDGKVKLKDIRANQEEEVPRKDFVEVLKQRLSNP

SEQ ID NO: 10631 - protein, 397 aa, Triticum aestivum
  unsure (1)..(397): unsure at all Xaa locations
  Clone ID: TRIAE-23APR03-C54183_1.p
IRERKIHTGAQNPQRNRADSARSGRESATDGDRRRWRWGRGWGRRGAGXSVLVTGGAGFIGTHTVLQLLEKGYAVTVVDNFHNSVPEALDRVRHIVGPALSARLQFIFGDLTIKDDLEKVFAAKRYDAVIHFAGLKAVAESVAHPEMYNRNNIVGTVNLYDVMKKHGCNKLVFSSSATVYGQPEKVPCFEDSPLKALNPYGRTKLYLEEMLRDYQHANPEWRTILLRYFNPIGAHESGDIGEDPKGVPNNLLPYIQQVAVGRRPELNVYGHDYRTRDGTAVRDYIHVVDLADGHIAALEKLFATPDIGCVAYNLGTGRGTTVLEMVSAFEKAYGKKIPVKMCPRRPGDSEQVYASTAKAEEELGWRAKYGIEEMCRDQWNWAKKNPYGYCGNAENKD

SEQ ID NO: 10632 - protein, 470 aa, Triticum aestivum
  unsure (1)..(470): unsure at all Xaa locations
  Clone ID: TRIAE-23APR03-C541_1.p
MARTGLADATAPEADAMPAASKDAADVRMISTKELQAHAAADDLWISISGDVYDVTPXLRHHPGGEVPLITLAGQDATDAFMAYHPPSVRPLLRRFFVGRLTDYTVXPPASADFRRLLAQLSSXAGLFERVGHTPKFLLVAMSVLFCLPLCCVLAYSRTGGNMVAGGLLGFIWIQSGRHGHDYGHQQPPRHPAHNGLLEVILRDLRTEXGLPDGTATFSEANLMTSNTLRAAALQARQATTGPPPKNPVWGALTTSAXGVRGLDQDLLQRVEPCVQAVIGFCLDSVDILILLALEIVLDXRVARLQFLEFTRVFMLQLWTVTPHLDWWVRVAMVTAXLVLEVHHQMHCXSDTSFSACLLCDHKGXEWFVRQAAVLLHSKCSPWMGXFQVGLQNQVEHYLFPRLPRCHYRMVAPIVRDLCKKHGLSYGAATFWEANVMTWKTLRAAALQAREATTGAAPKNLVWEALNTHG

SEQ ID NO: 10633 - protein, 334 aa, Triticum aestivum
  Clone ID: TRIAE-23APR03-C543_27.p
MDPWVSSQPSLSLDLHVGLPPMGHPHSHHQAAPMVALAKPKILVEENFMQLKKDPEVAVLESELQRVSEENRRLGEMLREVASKYETLQGQFTDMVTAGAHAGGNNHYNNQPSSASEGGSVSPSRKRKSEESLGTPPPSHQQHYAAGLAYAAAPDQAECTSGEPCKRIREECKPVVSKRYVHADPADLSLVVKDGYQWRKYGQKVTKDNPCPRAYFRCSFAPSCQVKKKVQRSAEDKAVLVATYEGEHNHAQPPKLQGSGGRKSADAAAVHASPAPPLAQQQPMQQSTTEAGSAADRKNLAEQMAATLTRDPGFKAALVSALSGRILELSPSDS

SEQ ID NO: 10634 - protein, 609 aa, Triticum aestivum
  Clone ID: TRIAE-23APR03-C543_46.p
MDNCTTISDLFPKGKKTYLVNGVSTTGWFSVDYNSIDLTNVTLLRAILSRTNRFDGSFTLVQVEVALSQYKAPAWLNVQHDSFYSQFNLSMRSYILSMSKQYTVDYISSPEVSFLKSLVGRVGRKTKLVFRFLDEGLVEPSTNQTYGSMLKNLSSIKTFASGILVPKHYIWPVTADNYLQPSTSVVDDAHKAGLEIYAADFANDFALSYNYSYDPLAEYLRFIDNGAFCVDGLLTDFPITPLEAIGCFSNLNNTKADHGAPLVISHNGASGDYPDCTDLAYQKAVVDGADVIDCDVQVTKDGIPICMSSIDLMDVTTVASSQFASQAGVISDIKAVAGVYTFNLTWEDIANNLKPMISNPFGQISLSRNPRNRNAGKFMRLSDFLAFAKGEDLSGIMITVEHASFMAEKLGFGVVDAVIKAVDDSGYSKQTAKKVMIQSTNSSTLVKFKQLAKYNLVYKIDEVVKDAAPSSLADIKKFADAVSVSTKSVYPESSNFLINQTNPLVKSLQSAGLPVYVYLLRNEFFSQPYDFFSDATSQINALVHKGGEGGGVDGLITDFPGTAHRYKLNSCRNMGTRRPTTCCLPSAAASLGSYRIKQHCHQQWPQSRC

SEQ ID NO: 10635 - protein, 168 aa, Triticum aestivum
  unsure (1)..(168): unsure at all Xaa locations
  Clone ID: TRIAE-23APR03-C5473_1.p
MMGTAVDLGRRQGDSRFYDAARARRGHHHGLPKSRHMMDDSDEDFRDSSSDGSSDYEHVRAKHFAQEGFSRDVGESGVTHGRLLFQYLEFDSPFCREPFTVKISSLXARFVGWRCCRGXGLISAALVVHSYISIXRIPIGSALRHVDASFLVLHKLPHDLLSRVWWSS

SEQ ID NO: 10636 - protein, 320 aa, Triticum aestivum
  Clone ID: TRIAE-23APR03-C5473_3.p
MMGTAVDLGRRQGDSRFYDAARARRGHHHGLPKSRCAAAAVTQEKAPEEPSRLPASPVGVAGNLKRFVAAVTLSVPAEYPSERGEWRGCGVDANRERPYFVLDDLWEAYKEWSAYGAGVPLVLDGCDGVVQYYVPYLSAIELYGDSSEGFSRDVGESGVTHGRLLFQYLEFDSPFCREPLTDKISSLSARFSGLRTLRSCDLSARSWMSIAWYPIYRIPTGPTLKDLDACFLTFHQLSNCPQGDNLWAPDNLWAPDSTPNIPLPVFGLASYKFSNSVWSSTDGDWKLASCLRQAAADWLRDSRAGHPDYQFFVSRGAYNR

SEQ ID NO: 10637 - protein, 823 aa, Triticum aestivum
  Clone ID: TRIAE-23APR03-C54_54.p
MATFAVSGATLGVARPAGAGGGLLPRSGSERRGGVDLPSLLLRKKDSSRAVLSRAASPGKVLVPDGESDDLASPAQPEELQIPEDIEEQTAEVNMTGGTAEKLESSEPTQGIVETITDGVTKGVKELVVGEKPRVVPKPGDGQKIYEIDPTLKDFRSHLDYRYSEYRRIRAAIDQHEGGLEAFSRGYEKLGFTRSAEGITYREWAPGAHSAALVGDFNNWNPNADTMTRDDYGVWEIFLPNNADGSPAIPHGSRVKIRMDTPSGVKDSISAWIKFSVQAPGEIPFNGIYYDPPEEEKYVFQHPQPKRPESLRIYESHIGMSSPEPKINSYANFRDEVLPRIKRLGYNAVQIMAIQEHSYYASFGYHVTNFFAPSSRFGTPEDLKSLIDRAHELGLLVLMDIVHSHSSNNTLDGLNGFDGTDTHYFHGGPRGHHWMWDSRLFNYGSWEVLRFLLSNARWWLEEYKFDGFRFDGVTSMMYTHHGLQMTFTGNYGEYFGFATDVDAVVYLMLVNDLIHGLHPDAVSIGEDVSGMPTFCIPVPDGGVGLDYRLHMAVADKWIELLKQSDESWKMGDIVHTLTNRRWLEKCVTYAESHDQALVGDKTIAFWLMDKDMYDFMALDRPSTPRIDRGIALHKMIRLVTMGLGGEGYLNFMGNEFGHPEWIDFPRGPQTLPTGKVLPGNNNSYDKCRRRFDLGDADFLRYHGMQEFDQAMQHLEEKYGFMTSEHQYVSRKHEEDKVIIFERGDLVFVFNFHWSNSFFDYRVGCSRPGKYKVALDSDDALFGGFSRLDHDVDYFTTEHPHDNRPRSFSVYTPSRTAVVYALTE

SEQ ID NO: 10638 - protein, 241 aa, Triticum aestivum
  unsure (1)..(241): unsure at all Xaa locations
  Clone ID: TRIAE-23APR03-C54_76.p
MGLGLRLPFCLLLLLLVSLGSAQGRSTVFLDIQEEARGPGQIINDQLTLSKIPVRVERGSPLCPACEKFTDEALSYLSQKQSQDKMMEVLHEACSQTFSLEKKCXEFVDSYATLLFAKIAEIKPEEFCKRNGLCRDNALLSGVRSESTCVFCHHLMDEVLSKLKDPDAEFEIIQILLKECKKIEGHEQQCKRLVLQYIPLILVNGEKFLEKNDICTIVQACDAGKKTMVGPFSEEGLLRDA

SEQ ID NO: 10639 - protein, 376 aa, Triticum aestivum
  unsure (1)..(376): unsure at all Xaa locations
  Clone ID: TRIAE-23APR03-C54_78.p
GIRSCAPDTKPIGTAAFVSRASFGRVSTDLAMECLAEMPHAPLDRRPRKRQRLGWDVGPEIPQLKKLCGEEVANVISAMTMGLSSGGIVFSQETQGLFRFATPPLREDDKDGHYVFAVGDNLTSRYRINAKMGEGTFGQVLECWDRERKEMVAIKIIRGIKKYRDAAMIEIGMLEQLCKYEKSRSRXSSRSPKEGSYYKRVPKSSSIKVIDFGSTTYDQQDQTYVVSTRHYRAPEVILGLGWSYPCDIWSVGCILVELCTGEALFQTHENLEHLAMMERVLGPLPYHMLKKADRHGEKYVRKGRLNWPEGCASRESMKAVMKLPRLQNLVMQNVEHSAGDFINLLQGLLSYDPASRLTAQEALEHPFLTERSERRR

SEQ ID NO: 10640 - protein, 404 aa, Triticum aestivum
  unsure (1)..(404): unsure at all Xaa locations
  Clone ID: TRIAE-23APR03-C54_79.p
MATTARPLVSVKALDGDMATDAAGVPMPHVMKAPIRPDVITFVHRLLSCNSRQPYAVSRKAGHQTSAXSWGTGRAVSRIPRVGGGGTHRAGQGAFGNMCRGGRMFAPTRIWRKWHRRVNVRLRRVAVASALAATAVPAIVTARGHRIESVPEFPLVVSDSAEGIEKTAQAIKVLKQLGAYADAEKAKESVGIRPGKGKMRNRRYINRKGPLIVYGTEGSKIVKAFRNLPGVDVANVERLNLLDLAPGGHLGRFVIWTESAFKKLDEVYGSFEASSSKKKGFVLPRPKMTNADLGRLINSDEVQSVVKPINKEVKRREARKNPLKNAAAVLKLNPSFGTARRMAVLAEAARVKARKEKINSKRTKLSAEEASKIKAAGKAWYQTMISDSDYTEFDVFSKWLGVSQ

SEQ ID NO: 10641 - protein, 405 aa, Triticum aestivum
  Clone ID: TRIAE-23APR03-C5513_1.p
MAAVATILCGGAVAGHQRSRRRAAPSLHVRGGSASDAAHLVCGRKLRPALFPASSFGALPLSSPGSRKLLRTSASAATPSSDSQGQAKPIGFLERYPALVTGFFFFMWYFLNVIFNILNKKIFDYFPYPYFVSVTHLSVGVLYCLISWSTGLLKRAPMNSTLLKLLLPVAICHAIGHVTSTVSFAAVSVSFAHTIKALEPFFNAAASQFILGQQVPFTLWLSLAPVVIGVSIASLTELSFNWTGFINAMISNISFTYRSIYSKKAMTDMDSTNLYAYISIIALIVCIPPALIIEGPQLVQHGFKDAIAKVGLAKLVSNIFLAGLFYHLYNQVATNTLQRVAPLTHAVGNVLKRVFVIGFSIIIFGNKITTQTGIGTAIAISGVALYSVIKAKIEEKKEGVAAAAP

SEQ ID NO: 10642 - protein, 244 aa, Triticum aestivum
  Clone ID: TRIAE-23APR03-C55262_1.p
MDRVQLVLLGLPILLFCSDVVTLFAPQPPAAPKPHRHPQPAAGAFQPGDSSPDAADSAQLAEAQVDGPGSGTTVELKFCASCSYKGNAMTMKRMLDTSFPGIHVVLENYPPPFPKRALGKMVPFVQVGAIATLMAGDQIFPRFGMVPPPWYYSLRANRFGTMASVWMFGNFAQSLLQSSGAFEVYCNGQLVFSKLSEQRFPSEFELRELIGNRLSDSQIGKNLEKDLVLDDDVESTHDHLSVST

SEQ ID NO: 10643 - protein, 378 aa, Triticum aestivum
  unsure (1)..(378): unsure at all Xaa locations
  Clone ID: TRIAE-23APR03-C553_145.p
MARSIALVCFLVVGLCLVGAVCASAAAVGGNGARLVNAVYVFGDSLVDVGNNDYLPAPAPRANRPYGMDLPGRPTGRFTNGYNLADVISQRMGFEMSPKXTSPCCRTTRFCWGLCKIGANYASGGSGILDTTGKGTLTMRTQVEYFKKAADNMICYPSKEEHLARSLFLLSGGGNDFSAFDPSTASPQAYVVKMVTTYIEHIQALYDMGARMVGILDVPPIGCTPGQRIDMPNGECNEQANSLAQAFNGLLRSSFAKAAAANMKELKYSIAANYNILKDMMANSFVAGLRQVKTACCGSGKLNAEVMCSHQGTTACPAAEHDDYMFWDMLHPTHATIQRGVVALFYGNGPKYGEPVNFGTLVTGQNVSPAIKMVVDEQ

SEQ ID NO: 10644 - protein, 149 aa, Triticum aestivum
  unsure (1)..(149): unsure at all Xaa locations
  Clone ID: TRIAE-23APR03-C553_167.p
MGQQLGRDKIGSNLTADDIASAFYFSLLLSPVVSFWDCIFRKIRYSFRPEWQEVTVVMEKAAGNQAGKVLKKGKKKQAAKDELDRXKQAEKKRRRXLEKALANSAAIISGAGEERSSRRKRSKERLDEEGASIARSGRFFMSFIGEDSR

SEQ ID NO: 10645 - protein, 248 aa, Triticum aestivum
  Clone ID: TRIAE-23APR03-C553_175.p
MKKCASELEFEAFIRQHIAAAEAEAQRGRPGHGNDDGGFGGDPGARADVFSPGGGLPGLCFGDSQNALELEGSNAGHLWWSEGLRAPHHTVPAPTQSQTPAVSASPRETISGNQALETESDSDSESLVEIGGGRCKRSGKSSDTRRIRRMVSNRESARRSRRRKHAQLTDLELQVEQLKSESATLFKQLTEANQQFTTAVTDNRILKSDVETLRIKVKMAEDMVARGAVSCGLGQQLGLAPFLNSRKM

SEQ ID NO: 10646 - protein, 310 aa, Triticum aestivum
  unsure (1)..(310): unsure at all Xaa locations
  Clone ID: TRIAE-23APR03-C553_193.p
MERLQRIFGAGGMGQPPSDSPLLDSSEQVYISSLALLKMLKHGRAGVPMEVMGLMLGEFVDDYTVRVVDVFAMPQSGTGVSVEAVDHVFQTNMLDMLKQTGRPEMVXVGWYHSHPGFXGAGLSGVDINTQQSFEALNPRAVXAVVIDPIQSVKGKVVIDAFRLINPQTMMLGQEPRQTTSNVGHLNKPSIQALIHGLNRHYYSIAINYRKNELEEKMLLNLHKKKWTDGLILKKFDAHSETNEQTVQEMLSLAIKYNKAVQEEDELSPEKLAIANVGRQDAKKHLEEHVSNLMSSNIVQTLGTMLDTVVF

SEQ ID NO: 10647 - protein, 158 aa, Triticum aestivum
  Clone ID: TRIAE-23APR03-C5541_1.p
MEYQGQQQHGQAATNRVAEYGNPVAGHGAGTGMGAHGGVGTGAGAAAGGHFQPTREEHKAGGILQRSGSSSSSSSSEDDGMGGRKKKGIKDKIKEKLPGGHGDQQQTAGTYGQQGHTGTAGTGGTYGQPGHTGMAGTDSTGEKKGIMDKIKEKLPGQH

SEQ ID NO: 10648 - protein, 354 aa, Triticum aestivum
  unsure (1)..(354): unsure at all Xaa locations
  Clone ID: TRIAE-23APR03-C5547_1.p
NLAANNLLIDSPDGVSYSYLKKSADILGNRSERTAKYSLXVFPTKWLERFPQXYKEREFYLTGESLXLGHYVPQLAQAIKRHHEATGDKTINLKGYMVGNALTDDFHDHDGLFQYMWTTGLISDQTFKLLNIFCDHPFSPPPSAQSDTFLDIASTEAGNIDSYSIFTPTCHSSFASSRNKVVKRLRSVGKLGEQYDPCTEQHSIVYFNLHEVQKALHVNPVIGKSXKWETCSEVINTNWKDCERSVLHIYHELIQYGLRIWMFSGDTDAVIPVTSTRYSIDALKLPTVIPWHAWYDDDGEVGGWTQGYKGLNFVTVRGAGHEVPLHRPKQALTLIKSFLAGSPMPVLSDLRSDM

SEQ ID NO: 10649 - protein, 189 aa, Triticum aestivum
  Clone ID: TRIAE-23APR03-C55605_1.p
MMSSKKLAQLSKKWQGISAIGRRRVTTTDKDVHPSCSSVAGKGHFVVYSSDGRRFEIPIACLRTMIFEELLRMSQEEFGFTSEGRITLPCDTTMMEYVMCLLRREASEDVERALLSSIITTCHHPSRMMQAATGLHQQFSVRSSSRVNISRFFFLFSCSIFFPGCTFGAHLLCNVFPRVPYCGCTDGCM

SEQ ID NO: 10650 - protein, 578 aa, Triticum aestivum
  unsure (1)..(578): unsure at all Xaa locations
  Clone ID: TRIAE-23APR03-C5579_1.p
RISFHQNLAPPSLRLSRPTAPLPTPRPRHGHPPPRSRHHGRAAVRPGTSATTTVSAWQAVANSVKSSLGPVGPDKILADDGGDITITNQGATILRMLEVEHPAANVPVKLAERQAREVAEGTASRVVVAAELLKSPNGVVRNKIHPRSIRSXIKTWQSLTNGEGLKYVXEWLFVKVDRLAECTLIKCAKTSILSKPINTDGTFLAIVGXLSTSKSADSKREVKYPIMRFKXFNILKAHGKSAKESYLLNGYALNTGRAAQGMPTRVTPARIACLDFNLQKTKMQMGVQVLVSDPRELEKIRERESDITKERIQKVLKAGANVVFTTKGIDDMSLKYFVEAGAIAVRRVRKEDLRHVAKATGATMXVTTFADMEGEXETFDPSLLGPSSKAFEERXIILVKGTKNTSAVSIILRGANDLMLXEIERSLHDALCIVKRTLESNTVVAGGGAVEAALSVYLENLATTLGSXREQLAIAEFAESLLIIPKVLAVNAAKDATDLVAKLRSYHHKAQTNADKQHLSSMGLDLTKGVIRNNLEHGVIEPAMSKVKIIQFATEAAITIVRIDDMIKLDKEESGQEV

SEQ ID NO: 10651 - protein, 163 aa, Triticum aestivum
  Clone ID: TRIAE-23APR03-C557_41.p
MVVACAPSPGPRLTLFLILHGAPLCPSSPTRTLTRTCYPSRACLSTLRRLTLFLIFGPSEFSVAVTIFGGRGHAATWGKKLDAEAYDCNNVVEQELPCGGVLIYQSFAANEEVAVSAGSPRSVFHCFEAETVESHPLVKEGKLANLLAWRAEDSLEEGVVLCE

SEQ ID NO: 10652 - protein, 106 aa, Triticum aestivum
  unsure (1)..(106): unsure at all Xaa locations
  Clone ID: TRIAE-23APR03-C55995_1.p
GXLQLGSCKIIPXDLHFVLRMRHMFEYLSLESHSNKARRMESTQSAKFKRSFTLPARMSSSNSPSPSVSASTGPAPSQQQQQQQGMEYRAQHEGSVYSDLMETFLE

SEQ ID NO: 10653 - protein, 181 aa, Triticum aestivum
  Clone ID: TRIAE-23APR03-C5606_1.p
MSLAPSIPSIKVKVGRIAPPPPYRACKSFAVIRSSKAEGPRRPTAPPLSPPPPMPPKTPALSTPPSLSQPPTPVKPAQPSPPPPETKPAVAAAATPPVGGVVTFEYQRKVAKELQEYFKKKKLEETNQGPFFGWLAKNEIANGRWAMFGFAVGMLTEYATGSDFVEQMKILLSNFWIVDLD

SEQ ID NO: 10654 - protein, 267 aa, Triticum aestivum
  unsure (1)..(267): unsure at all Xaa locations
  Clone ID: TRIAE-23APR03-C5640_1.p
GPNHHYRAANSTSRGPRRSRPPANHAALSPPRLSAQAATISSVSHSSTHCSVVRAQHSSLRSIVSTSPRXKTAFRGVPLVDSRWLRRAGARRRLVQVNAKTAGAAQEHRGGGRHAGQPPTWARHRATAGVDSGVEAKVNFAKSGAQVKPNTVFFXVSCAGGDIGVKRLPEWPAPPRFGPAGYVIHRRTRAXTHICLDCGYIYFLPKAFEEQPDEYGCPQCNAPKKRFARYDVESGKPIGGALPPLTVIVSLVIGIAGIGALLVYGLQ

SEQ ID NO: 10655 - protein, 153 aa, Triticum aestivum
  Clone ID: TRIAE-23APR03-C56446_1.p
MAMQQTRDPTAKLPSAFPVAGASPPPPYHHHHYGTFSPPPPPPAAAAAYDPSLKGRAAQGVVAFPCTIQQQVLVEGLPVREPRLPFCGVGVGWVLFLLGFFLAAIPWYIGAFLLFFVALDHREKPGLIACTVAGIFAVVPFMLNGVRMRPFFF

SEQ ID NO: 10656 - protein, 784 aa, Triticum aestivum
  unsure (1)..(784): unsure at all Xaa locations
  Clone ID: TRIAE-23APR03-C564_1.p
MTTDQPVISLRPGGGGGGPRGGRLFAPAFAVAASGSGDFLRPHGGGAXRRLQDWXLHSEARERVRYSRDQLLDLRKITDVTEQILRLQQEIEAELHGDDQSWVRNDSNVQLQTKINAKFSVLDQCQGRDPRGNHQGPLINKVSSINKPSPINPSLVPQDTGAPSGRRQLQFTGRQPSRPPSLEVGPPPSLSXAYIPWSALKCNLSFCTYSLKTVKGILNKLTPAXFDLLKGXLLDSGITTADILKDVISLIFEKAVFELTFCPMYALLCSEHNDNLPESPSKVPGGKYTXKIARRKIWIRMPCFRVRDCKLMVLTLVNAPTQFGEVVARLILSCGLRFEAVEGILKAMEDTYFLKAIFSAVTKTLEADPAGQAILSSHASRSSNAVQQACSDINSSWQLNHSHGRXCLVKKQAYGVFSIAWIVSPQRNRDVSHHVVLTCRFLRGHMSVDFCCEERKNPWPARAGRRRPNXPLEPGNEQGFFVFKMGCFCVSSNVIISFQFLHNLXNVLWXLEYSVGYNISCQHCRKRKLSKKLSLINKPPPSHPRLIPQGTGALIGKSAGKSALLGTGGPPSRPSSLTASPTPLPAQTTASPKPSSATPASVPIPDKAASSAKVIPAGLQKKTASLLEEYFGIRILDEAQQCIEELQSPDYHPEIVKEAINLALDKGASFVDPLVKLLEHLYTKKTFKTEDLENGCLLYGSLLEDIGIDLPKAPTQFGEVVARLILSCGLRFEAVEGILKAMEDTFFRKAIFTSVTKTLEADPAGQAILSSHAAVVDACNSLSI

SEQ ID NO: 10657 - protein, 231 aa, Triticum aestivum
  unsure (1)..(231): unsure at all Xaa locations
  Clone ID: TRIAE-23APR03-C5678_1.p
MATASLSALSSAAAAAGKRFVLSSPSLSFASRRIAAPARLRAAAVPGARRFAASAASASTVVATIAVGDKLPDATLSYFDPADGELKTVTVGELTAGKKVVLFAVPGAFTPTCSQKHLPGFIEKAGELRAXKGVDTVACVAVNDAMSWRKXRQGGGIGQRSKTCSCQSDGNXSELTRALGGDMDLSDKPMGLGVRSRRYALLADDGVVKVLNLEEGGAFTTSSAEEMLKAL

SEQ ID NO: 10658 - protein, 241 aa, Triticum aestivum
  Clone ID: TRIAE-23APR03-C5679_1.p
MADSPPVHPVTGKKTYSAAPSRAPSQLSSAARQRNPIQDNNTHSQPSVAMAALARRAGGSPAAALWAAARGFASVGSDIVSAAPGVSLQKARSWDEGVATKFSTTPLKDIFHGKKVVIFGLPGAYTGVCSQSHVPSYKNNIDKLKAKGIDSVICVAVNDPYVLNGWAEKLQAKDAIEFYGDLDGSFHKSLDLEIDLSAALLGRRSHRWSAFVDDGKIKAFNVEKAPSDFKVSGAEVILDQI

SEQ ID NO: 10659 - protein, 293 aa, Triticum aestivum
  Clone ID: TRIAE-23APR03-C567_118.p
MKATAGALLAVVAAVLLRGVAAAPRKPVDVPFDKNYVPTWAQDHIHYVNGGREVQLSLDKTTGTGFQTRGSYLFGHFSMHIKLVGGDSAGTVTAFYLSSQNSEHDEIDFEFLGNRTGQPYILQTNVFSGGKGDREQRIYLWFDPTKDYHSYSVLWNLYMIAFFVDDTPIRVFKNSKDLGVRYPFDQPMKLYSSLWNADDWATRGGREKTDWSKAPFVASYRGFHVDGCEASAEAKFCATQGARWWDQPEFQDLDAAQYRRLAWVRKEHTIYNYCTDHDRYAAMAPECKRDRDV

SEQ ID NO: 10660 - protein, 492 aa, Triticum aestivum
  Clone ID: TRIAE-23APR03-C567_123.p
RILPNRAQGHRDACSLQLSPRHSCAFRLIDTVVQYKCPNRKRERHGGIHLLLLLAMAAYAGLLRVALVLIAAAATWAAALDDPAGLLRRAKEAEFMDWMVGVRRRIHETPELGYEEFDTSELVRRELDAMGIPYRHPFAVTGVVATVGTGGPPFVALRADMDALPMQESVEWEHKSKVPGKMHGCGHDAHVAMLLGSAKILQEHRDELKGTVALLFQPAEEGGGGAKKMVEAGAVENIEVMFGLHVADSVPIGVLASRPGPIMAGSGFFEAVISGKGGHAALPHHTIDPILAASNVIVSLQQLVSREADPLDSQVVTVGKFQGGGAFNVIPDSVTIGGTFRAFMKESFNQLKQRIEEVIVTQASVQRCSAVVDFLDKDKPFFPPTINNPELHDFFAKVCSEMVGPNNVREKQPLMGAEDFSFYTEAVPKTYYYFVGMLNETRGPQAPHHSPYFTINEDALPYGAAMQASLAARYLLEHQPATAAKVEPRDEL

SEQ ID NO: 10661 - protein, 535 aa, Triticum aestivum
  Clone ID: TRIAE-23APR03-C568_2.p
MAREQLEVLTALDAAKTQWYHFTAIVIAGMGFFTDAYDLFCISLVTKLLGRIYYYREGADAPGSLPPNLAAAVNGVAFCGTLSGQLFFGWLGDRMGRKRVYGMTLMCMVLCSIASGLSFGSTPGSVMATLCFFRFWLGFGIGGDYPLSATIMSEYANKKTRGGFIAAVFAMQGFGILTGGVVTLIVSAAFRAAFPTQAYQDAPLASTPAQADFVWRFILMFGAVPALMTYYWRMKMPETARYTALVAKNAKQAAADMSKVLQVDIGAEEEDPKANDGGAGAADDRNSFGLFSGEFLRRHGLHLLGTATCWFLLDIAFYSQNLFQKDIFTAINWIPKAKTMSALEEVHRIARAQTLIALCGTVPGYWFTVALIDRIGRFWIQLGGFFFMAVFMLGLAFPYHHWTTPGNHIGFVVLYGLTFFFANFGPNSTTFIVPAEIFPARLRSTCHGISAAAGKLGAIVGSFGFLYLAQNQDPAKVDHGYKAGIGVRNSLFILAACNFLGMGFTFCAPESNGLSLEELSRENEEEAPDARTVPV

SEQ ID NO: 10662 - protein, 643 aa, Triticum aestivum
  Clone ID: TRIAE-23APR03-C5697_1.p
MTDGHLFNNISLGGRVGNNPGQFRLYSGGLAWKKQGGGKTIEVDKADIISVTWMKIPRSYQLSVGTKEGIRYVFKGFREQDVSNLTNFIQKNTGTTPEEKQLSVSGHNWGAVDINGNMLSFNVGSKEAFEVSLSDVSQTQLQGKTDVVLEFHVDDTTGANEKDSLMDLSFHVPTSNTQFLGDEERPSAHIFWQKILAIADVGSSEEAVVSLEGIAILTPRGRYTVELHMSFLRLQGQANDFKIQYSSILRLFVLPKSNNPHTFVVITLDPPIRKGQTLYPHIVIQFVTENVVEKELSLSEEVLAEKYKDRLQSSYNGLEHEVFSKILRGLSGAKVTRPSTFRSCQDGYAVKSSLKAEDGLLYPLEKGFFFLPKPPTLILHEEIEYVEFERHGAGGASMSSHYFDLLVKLKNDQEHLFRNIQRNEYHNLFNFVSGKNLKILNLGEDGQDRTGAVAAALQSTDDDPVDPHLERIKNQAGDEESDEEDEDFVADKDDSGSPSDDSEEGSDASISDGEKEKSSKKEASSSKPPAKRKPKNVDVEGSEKRKPKKKQKKDPNAPKRAIAPFMYFSKAERANLKNINPELSTTDIAKKLGEKWQKMSAEEKQPYVEQSQVDKKRYAEESAAYRGAGAAPVDVDSADGSSD

SEQ ID NO: 10663 - protein, 285 aa, Triticum aestivum
  Clone ID: TRIAE-23APR03-C56987_1.p
MEAVAALDARALFSPPTALPSSPSPHLRLAARPRALAASPAFVAATPKQRFLTPHPDPAGGRGTRDVVAMVIPFLRGTAFEQPPPDLASFLYKNRIVYLGMCLVPSVTELMLAEFLYLQYEDAEKPIYMYINSTGTTKNGEKLGYETEAFAVYDAMRYVKIPIFTLCIGNAWGEAALLLAAGAKGNRAALPSSTIMMKQPIGRFQGQATDVDIARKEIRNVKIEMVKLLSRHIGKPMEEIARDIRRPKYFSPSEAVDYGIIDKVLHNVKSQTDAGLVSEVKKELI

SEQ ID NO: 10664 - protein, 61 aa, Triticum aestivum
  Clone ID: TRIAE-23APR03-C57108_1.p
HVTAISILPVLAYASYVVLACCAEASQRCAMTFASTGGYFIGTRRGSCRVMMLCNARLDAE

SEQ ID NO: 10665 - protein, 572 aa, Triticum aestivum
  unsure (1)..(572): unsure at all Xaa locations
  Clone ID: TRIAE-23APR03-C5722_1.p
MADDAASAPPTAQLAAASISSPPSWDLEPPTSRTRIRAILDAGXAIAGERVVVGGWVKTGRPQGKGEFAFLEVNDGCCQGNLXQVIVENDVXHPLAXLTHTGTSVXYVEGVLKKPPTGNXARQRIELKVERVIRASGRWTPPAYPLPKTKITLETLRDFVHLRARTNTIGAVARIRHQLAYATHSFFDENGFLYIHTPIITTSDCEGAGEMFQVTALFSQAEKVEKELKENPAPSEADVEAAKLVVKEKGDAVAQLKAAKASKQEITAAVSVLTKAKENVLRVEERSKLKPGLPLKGDGKIAFENDFFKRQAFLTVSGQLQVETYACALSNVYTFGPTFRAENSHTSRHLAEFWMVEPEIAFANLQDDMNCAERYVQYLCKWLLKHCREDMEFMVKHVDKTAIERLELVSSTPFERISYTKAVEILEGVDKKFENKVEWGIDLASEHERYLTEVIFKRPVIVYNYPKGIKAFYMRLNDDQKTVAAMDVLVPKVGELIGGSQREERLDILKQRILDADLPLEPYEWYLDLRRFGSVKHSGFGLGFERMILFATGLENIRDVIPFPRYPGRADL

SEQ ID NO: 10666 - protein, 316 aa, Triticum aestivum
  Clone ID: TRIAE-23APR03-C57681_1.p
MAQPSVILATASYDHTIRFWEAKSGRCYRTIQYPDSQVNRLEITPDKRFLAAAGNSHIRLFDVNSNSPQPVISYDSHTSNVMAVGFHCDGNWMYSGSEDGTVRIWDLRTATCQREYESRAAVNTVVLHPNQKELISGDQNGNIRVWDLAANSCSCELVPEVDTAIRSLTVMWDGSMVVAANNRGTCYVWRLLKGTQTITSFEPLHKLQAHDGYILKCLLSPEFCDPNRYLATASSDHTVKIWNVDGFKLEKTLVGHQRWVWDCVFSVDGAYLITASSDTTARLWTMSTGEAIRVYQGHHKATVCCALHDGAESAPS

SEQ ID NO: 10667 - protein, 471 aa, Triticum aestivum
  Clone ID: TRIAE-23APR03-C57753_1.p
MHMMRRLKSIASGRSSVSDPGGDSGSKRPKFDQDGLGDIVIQPHLSDDKPMHLDQESSSSSSHRDAEASTSTSMNPAKAEETGADLPKGMNDMTISDDKVDGHNNDKDAEGVTVDGNGTEAGQIIVTTIGGQNGKPKQKVSYMAERVVGTGSFGVVYQAKCLETGETVAIKKVLQDKRYKNRELQTMQLLDHPNVVQLKHHFFSTTERGEVYLNLVLEYVSETVYRVANYYCRLNQRVPILYVKLYAYQMCRALAYIHRVVGVCHRDIKPQNLLVNPHTHQLKLCDFGSAKKLVPGEPNISYICSRYYRAPELIFGATEYTTAIDIWSVGCVVAELLIGQPLFPGESGVDQLVEIIKILGTPTREEIRCMNPNYSEFKFPQIKAHPWHKLFGKRMPPEAVDLVSRLLQYSPNLRFTAVDACAHPFFDELRDPKTCLPNGRPLPPLFNFSGAELEGLPVELLHRIIPEHMRK

SEQ ID NO: 10668 - protein, 555 aa, Triticum aestivum
  Clone ID: TRIAE-23APR03-C57809_1.p
MLPEIREEGGTGAGTSATKAMSVSLSGKRGRYVRQVTGRHNDTDLHVAARAGDAAALRRALDEAAVVVAVGEGGEQLEAVRRAVAAEANEAGETPLLAAAERGHLEVVVELLRHLDAQGVAAKNRSGYDALHVAAREGHHAVLQEMLRHDRMFAKTFGPANTTPLISAATRGHAEVVKLLLEQDDFGLGEMAKDNGKNALHFAARQGHMEIVKALLEKDPQLARRNDKKGQTALHMAVKGTNCDVLRALVDADPAIVMLPDKNGNTALHVATRKKRAEIVIVLLRLPDTHVNALNRDHKTAFDIAEGLPHCEESSEIKDILSQHGALRSRELNQPRDELRKTVTEIKKDVHTQLEQTRKTNKNVHGIAKELRKLHREGINNATNSVTVVAVLFATVAFAAIFTVPGGNDNNGVAIVVQTASFRIFFIFNAIALFTSLAVVVVQITVVRGETKSERKVVEVINKLMWLASVCTTISFIASCYIVLGRHFQWAAILVSLIGGVTMTGVLGTMTYFVVKSKRMRKIRKKEKMSRRSGSSSWVDNTEISETELNQVYAL

SEQ ID NO: 10669 - protein, 472 aa, Triticum aestivum
  unsure (1)..(472): unsure at all Xaa locations
  Clone ID: TRIAE-23APR03-C5783_1.p
MEGLIKGLAKAAIDALDGGDDQRERGEDRAEAPRRHRPARDAEAEEDEEGCEQRDRSTWAEVVSEKKGGEPEEKRWGPRPSRREERREDEGWERTEGRKQQQHHPSAHGGSHSQYQGEGRISDGGSRLPHQQAPXAHREQQQVREDANDXGEKKQHGRPQQCEGPQQCEAWNAYKRPPSEQGHSEDFGQIHHGLNVEPTRTELNSLMXACSRLWELPGNRLVPGKDYRIECGEKDDMSSENLFSWLGDDVLTKPTYSRFCALLDNYNPHQGYKEVVTQQDKHEEAAFIEEIARTAPIKYLHRYLVLKGVASQDYDDFKAMLTSLWFNLYGRCGNSSCSSAFEHVFHVLVGEIKEQRGGDPRFSGYPITGIQFLSGTEAKGNLDYQRYPRRSDGLPDSETQLLTVQFEWHGVLKSVSSSLIGVSPEFELALYTLCFFMGGEDNRVDIGPYTVNVKCYRMGNNKIGSVFPIAEN

SEQ ID NO: 10670 - protein, 364 aa, Triticum aestivum
  Clone ID: TRIAE-23APR03-C57876_1.p
MGGVTSTIAARFAFFPPTPPSYTLVADAATGRLLIPEISRPPARRRRRDGGGDSSSGAAAAAEEEDATEVVRLRTRRGNEIVAVYVRHARASATLLYSHGNAADLGQMYGLFVELSRRLRVNIFGYDYAGYGRSTGKPTEYNTYADIEAAYNCLKEKYGVPDEDIILYGQSVGSGPTIDLASRLPNLRAVVLHSPILSGLRVLYPVKKTFWFDIYKNVDKISLVNCPVLVIHGTSDDVVDWSHGKQLWELCKVKHSPLWLSGGGHCNLELYPDYIRHLKKFVSSLGKKSTKPDLKELPATEDTSRKDAESVSSDKPQEAAKCRQISRKSLDSRVGKSKTVDVPEKPRMSSDDVDKFRRRRCLVW

SEQ ID NO: 10671 - protein, 334 aa, Triticum aestivum
  Clone ID: TRIAE-23APR03-C579_3.p
MAGHRACMFSVALALLGVLLGSIPAAVQSIGVCYGVNGDGLPSASEVVQLYQSNGITGMRIYFPDADALQALSGSNIDLIIDVANEDLASLASDRAAATAWVQTNVQAHQGLNIKYIAADNEVGYQGGDTGNILPAMQNLDAALSAAGLGGIKVSTSVSQGVTAGYPPSQGTFSAGYMGPIAQYLATTGAPLLANVYPYFSYVDNQAQIDINYALFTSPGTVVQDGANAYQNLFDALVDTFYSALESAGAGSVNVVVSESGWPSAGGTAATTDNAQTYNQNLIKHVGQGTPKRPSAIEAYVFAMFNEDKKGPAEIEKHFGLFNPDKSPAYPISF

SEQ ID NO: 10672 - protein, 358 aa, Triticum aestivum
  Clone ID: TRIAE-23APR03-C58067_1.p
MEVTPNHTQAVSGWAAMEPSGEVVPFAFKRRENGVDDVTIKVHYCGMCHTDLHFINNDWGITMYPLVPGHEITGVVTRVGANVSGFRPGDRVGVGCIAASCLDCDHCRRSEENYCDKVALTYNGIFWDGSVTYGGYSSMLVAHKRFLVRIPDALPLDAAAPLLCAGITVYSPMKQHGMLQAGRRLGVVGLGGLGHVAVKFGKAFGLKVTVISTSPAKEREARESLKADDFVLSTDEKQMQAMARSLDYVIDTVSAQHSLGPILELLKVNGKLVLVAAPDKPVELPSFPLIFGKRTVSGSMTGGMKETQEMMDLCGEHGITADIELVSTDGINDALARLARNDVRYRFVVDVAGSGSRL

SEQ ID NO: 10673 - protein, 210 aa, Triticum aestivum
  unsure (1)..(210): unsure at all Xaa locations
  Clone ID: TRIAE-23APR03-C58150_1.p
MASGVFGTPISEKTVLATGEYKEPITQKDVADYTMKMINAGGKDINAQTFVDNLKERYGNGISVKCLIYNATGATLNLANYKDWHGHIYDTPYPSDIQNGQWGAFLHVHPSGAAVGSAGAVVYRTKVPSSSSSCDWLFSWTVPYIGANGIYTEIREEGHYPSVGSWDYIYDVKLENANLNSTDKNXGYVSETNIGEGSTMNARGVFQFPY

SEQ ID NO: 10674 - protein, 264 aa, Triticum aestivum
  unsure (1)..(264): unsure at all Xaa locations
  Clone ID: TRIAE-23APR03-C5815_2.p
MATIVNTTEEEPMLAVVRSTAELAWADGGAEVADPEVARLCAEAQQHVLAGRWLDMATLMLASADLLLLAPRLSDKDLECTLTVICNLVTKAGSEDEALEIAKLICAKLTHQPGEKPTLRIKVLXSLYNLLPSLSGKALVYRKALELAAAAGKAAADCVVPTFKNIDAFVAYWGIGKPEQRDLFLAVTRILKDQKGMTKEYFKFLNKYLATFDGSADEADAIGAAKEEAAAAIIEFVKSSDLYQCDLLDMPAVAQLNQIQIPKT

SEQ ID NO: 10675 - protein, 350 aa, Triticum aestivum
  unsure (1)..(350): unsure at all Xaa locations
  Clone ID: TRIAE-23APR03-C58317_1.p
MAAAAGVPPSSLLRLRLPSLQPAASLPSSSPALLRRRPLLSLAAAPSRASVIAAAAAADSSNGNGNGSYSGNGSQASLMPQFSGLMLDESSRSKRPYKWQRVLLKVSGEALAGDHTENIDPKVTMAIAXLGVVVAITSRGGYVCRGGSQAACSGLDRSALDHIGMMATVMNAIFLQATMESIGIPTRVQTAFRISEVAEPYIRRRAIRHLEKGRVVIFAAGTGNPFFTTDTAAALRCAEINAEVVLKATNVDGVYDANPKHNPNARILETVSYNEVISRDLSVMDMTAVTLCQENNIPVVVFNLQNTGNIAKAIVGEKVGTFIGCTRNLEYRESTEGSLDQEDKILVSEW

SEQ ID NO: 10676 - protein, 207 aa, Triticum aestivum
  Clone ID: TRIAE-23APR03-C584134_1.p
MRRGGGAATAVAAAAEAERDAGARFRGVRKRPWGRYAAEIRDPAKKARVWLGTFDSAEDAARAYDAAARMLRGPKAKTNFPLSLPHHHQLQASYSPYPVAAAAAVPTSVAAAAARPACSSLSSTVESFGGPRARPVLPPRPPPPPILDGDCHSDCGSSASVVDDDCADAAASPSCGLLLPFDLNLPPEFGGVACNDDDELKLTALRL

SEQ ID NO: 10677 - protein, 266 aa, Triticum aestivum
  Clone ID: TRIAE-23APR03-C58549_1.p
MMYHAKKFSVPFAPQRAQNSEHVSNIGAFGGSNISNPANPVGSGKQRLRWTSDLHSRFVDAIAQLGGPDRATPKGVLTVMGVPGITIYHVKSHLQKYRLAKYIPESPAEGSKVEKKDSSDSFSNADSAPGSQINEALKMQMEVQKRLHEQLEVQKQLQLRIEAQGKYLQMIIEEQQKLGGSLEGSEERKLSHSPPTLDDYPDSIQPSPKKPRLDDLSTDAVRGVTQPGFESHLIGPWDQELCPKTNICDPAFQVDEFKANPGLSKS

SEQ ID NO: 10678 - protein, 109 aa, Triticum aestivum
  Clone ID: TRIAE-23APR03-C5879_3.p
MASETVVLKVAMSCGGCSGAVKRVLTKMEGVESFDIDMEQQKVTVKGNVKPEDVFQTVSKTGKKTAFWEAEATPVPEATPAADAVPAPEATPAADAAPAPEVTPANTVA

SEQ ID NO: 10679 - protein, 517 aa, Triticum aestivum
  unsure (1)..(517): unsure at all Xaa locations
  Clone ID: TRIAE-23APR03-C58836_1.p
SHEYSGLSFLNKGNAFILLLLAVAVPSLLLTGEASVPARPPHGCLHGGGSRPTPTPPRHGRPVAAPPRLGLGERVQRRQVPPKGQCLHTTPPERGILRPDLHGQGNSGRRAYARANADCFTRDLENMLACVEGSVSYRQSQVNPCWPQXFLVFGMGDIRAXILVGGTTLLGETGTLFNPFIYCDPALAGLEIDGKTIWKNPTGYLPGRMAPLKNFFGLMXFAFVILGIYWFYQYMKFWREVLPLQNCITLVITLGMLEMALWYFEYAEFNETGVRAKAITFWAVTFGTIKRTVARLIILIVSMGYGVVRPTLGGLTSKVVMLGGTFFVATEILELVENLGTVNDLSGKARLFLVYPVAILDASFIVWIFISLAKTLSQLQARRLMAKLDIYRKFTIALAITVLVSIGWIGYEIYFKSTDVFNERWQYAWIIPAFWHALSFSLLCVISYLWAPSQSSMRFTNDASEKFDREDSLSLIRPRPIVSNNGWSIASSTDVKMTKNTDSVTSFDEDDEENKRE

SEQ ID NO: 10680 - protein, 226 aa, Triticum aestivum
  Clone ID: TRIAE-23APR03-C58894_1.p
MKLLEYTPFDCVNVFLDQLNLGDCTIRGSLEAFSCKHAGNDRRLSISLEHEILDYLGKSSDSDPPSPVEHLSCRSSRKTLIYLVLTLGHMYPDYDFSAVRAHLFFKEEDMESFKQMVDNYLSEASRLWAARNEGSSLLDSMTKAIDEVIKIRECDIYSYNPDSDGDPFLEKGAIWSVNFFFYNRKLKRVVSFRCCSTCKEGGNWFGELFLLQPEAKASSELSLLLY

SEQ ID NO: 10681 - protein, 214 aa, Triticum aestivum
  Clone ID: TRIAE-23APR03-C59061_1.p
MAPAPAPIRDLLTSFSHSSDFLALSSGDGRIKVWDAVRGHLQTEFADIPSVEVGALRETKRGHLALDYTCMKWVQLSTKKKRKAGSSLLVLGTGSGDVLALDVAAGHWKWRISDCHPGGVTAVAYSRHGRSVYTAGADGMVCKIDASDGSVAGKFKSSSKAISALAVSSDGTVLATAAGQLRTFDASDNKKIQKFSGHPFRCKELKTTAYALKI

SEQ ID NO: 10682 - protein, 262 aa, Triticum aestivum
  Clone ID: TRIAE-23APR03-C59089_1.p
IRRFKQKETMSYFQATTCKPHTGLIADRPIMGLGKTCRLLPVPQYSLRPRPLGFRKLDKHIYPRLVLVAASHPRLTPVCASSGKGNPEIDNDPFMDHLKKAMADAKKPRPLQDVLKEKFAKLREQASGGGGGNGNRRGGNGGSGGPEDESFKESLDEVVQVILATVAFILVYIHIIRGEELYRLARDYTRYLVTGKRTARLKRSMQQWRSFSEKFMQNEGSQEERYERPAATEPMWWQQPQKFVHLMEELCRGNWRPHAQKS

SEQ ID NO: 10683 - protein, 148 aa, Triticum aestivum
  Clone ID: TRIAE-23APR03-C590_19.p
MKALFLIGLLALVASTAFAQYSEVVGSYDVAGGGGAQQCPVETKLNSCRNYLLDRCSTMKDFPVTWRWWKWWKGGCQELLGECCSRLGQMPPQCRCNIIQGSIQGDLGGIFGFQRDRASKVIQEAKNLPPRCNQGPPCNIPGTIGYYW

SEQ ID NO: 10684 - protein, 261 aa, Triticum aestivum
  Clone ID: TRIAE-23APR03-C5913_2.p
HLGATPPSPLPLLPVDQSRRTTGAPPEPPRRLEAVKSLLKPKPTPQQQLREWQRRLRNEGRNIERQIRDVQKEEKKVEKAIKESARRGDMGSAKALAKELVQSRKAVNRLYENKAQLNSISMHLGEIVATTRTVGHLSKSTEVMKLVNNLMKAPEIAVTMQEFSKEMTKAGVMEEMVNDAMDSALDDEDMEEEIEEEVDKVLSAIAGETASQLPDAVRKQKEKVTQPSTSEPAQRTAVAESVDEDDDDLEKIRERLAKVRS

SEQ ID NO: 10685 - protein, 345 aa, Triticum aestivum
  unsure (1)..(345): unsure at all Xaa locations
  Clone ID: TRIAE-23APR03-C59148_1.p
MGVDYYKVLGVDRGASDDDLKKAYRKLAMRWHPDKNPTTKKEAEAKFKQISEAYEVLSDFQKRTIYDQLGEEGLKGQPPPGAGGPGASSFYPGGGQSTSFPFNPRSADDIFAEFLGXGTMSGIGLGYSGLHTGNQGSYGGGVFSNEYLAKRFAEGSAGNMXRPSHKPAPIENQLSVTLADLYKGVAKKMKISREVIETSGRVSQVEEILTIDVKPGWKKGTKITFPEKGNESPSMMPADIVFIIEEKPHDVFTREGNDLVMTQKISLVEALTGYTVQLTTLDGRSLSRQVNSVIHPSYEEVIPGEGMPIPKEPCKKGNLRVKFSIKFPSRLTSDQKAGIKRLLGS

SEQ ID NO: 10686 - protein, 466 aa, Triticum aestivum
  unsure (1)..(466): unsure at all Xaa locations
  Clone ID: TRIAE-23APR03-C5914_1.p
SSHQTAPPRLPPRALRRRRRRSRSLGLEASTRPPRGAEAPEAPPVRPLQDAPAPAQIAAAIGILRPWPALPLLNIPSPSAAVLLSSCAADLLPSAAPRAGLVAAAVRGRAWIVPASAYHEQKRECFLVAAASAGGQWAGDGQAGKGERLSSVMLSQIVVFRGCCLPSIIFSPLPYWWVQVVLPYPKNTTTFWVGFLRVMVSLCCPWNRGMTSARHLXVLGGIPVPRDPTLDYLINIMSLVNVEMFFTNTIKAMDPFFSVLLSAMFLGELPTPWVXVLSLLPIVGXGVALASISEASFNWAGFXRAMGSNVTFQXRKFPSAKKLMLIKEEPLDNINLFSIIINLLSFITVMSFFLLAPVTLLTEGVKVTPTYLQSAGLNLQQVYTRSLIAAFCFHAYQQVSYMILARVSPVTHSVGNCVKRVVVIVTSVLFFKTPVSPINSIGTAIALAGVFLYSQLKRLQPKPKAA

SEQ ID NO: 10687 - protein, 265 aa, Triticum aestivum
  Clone ID: TRIAE-23APR03-C5924_1.p
MKLRAAILPGFMLPIAVLSPPALAQKTKGPPAPPAPVLPPPPPPPPPPRHVDLADLLTVAGPFHTFLDYLQKTNVLETFQSKANDTKEGITLFVPKDSAFAALRTTTFANLTSDQLKSLMLYHALPKYYSLAEFNKLSSLNPVATFAGSQYTLNLTDNMGSIRIKSMWSNPKISSSVYSTRPVAVYEVDKVLLPMQIFKSDPPLAPAPAPAPADAKTSDDAPSPASGKSASAKAKAGSKSASHRAGVGVASYLAVAVSGGVMMLL

SEQ ID NO: 10688 - protein, 2123 aa, Triticum aestivum
  unsure (1)..(2123): unsure at all Xaa locations
  Clone ID: TRIAE-23APR03-C593_1.p
RGVFLEPEAAERRALGTQCGHSRRAQATGVPSLPXSGSQVKVPQETXHSIPEEIYKNACVSTTDEAVDRCQVLGYPAMIKASWGGGGKGIRKVHNDDEVRALFKQVQGEVPGSPIFIMKVASQSRHLEVQLLCDKHGNVAALHSRDCSVQRRHQKIIEEGPITVAPPETIKELEQAARRLAKCVQYQGAATVEYLYSMETGEYYFLELNPRLQVEHPVTEWIAEINLPASQVVVGMGIPLYNIPEIRRFYGIEHGGGYHAWKEISAVATKFDLDKAQSVKPKGHCVAVRVTSEDPDDGFKPTSGRVEELNFKSKPNVWAYFSVKSGGAIHEFSDSQFGHVFAFGESRSLAIANMVLGLKEIQIRGEIRTNVDYTVDLLNAAEYRENKIHTGWLDSRIAMRVRAERPPWYLSVVGGALYEASSRSSSVVTDYVGYLSKGQIPPKHISLVNLTVTLNIDGGKYTIETVRGGPRSYKLRINESEVEAEIHSLRDGGLLMQLDGNSHVIYAETEAAGTRLLINGRTCLLQKEHDPSRLLADTPCKLLRFLVADGSHVVADTPYAEVEVMKMCMPLLLPASGVIHFVMPEGQAMQASDLIARLDLDDPSSVRRAEPFHGTFPKLGPPTAISGKVHQKFAASVNSAHMILAGYEHNINHVVQDLLNCLDSPELPFLQWQELMSVLATRLPKDLRNELDAKYKEYELNADFRKSKDFPAKLLRGVIEANLAYCSEKDRVTSERLVEPLMSLVKSYEGGRESHARAVVKSLFEEYLSVEELFSDDIQSDVIERLRLQHAKDLEKVVYIVFSHQGVKSKNKLILRLMEALVYPNPSAYRDQLIRFSALNHTAYSGLALKASQLLEHTKLSELRTSIARSLSELEMFTEEGERISTPRRKMAINERMEDLVCAPVAVEDALVALFDHSDPTLQRRVVETYIRRLYQHYLVRGSVRMQWHRSGLIALWEFSEEHIEQRNGQSASLLKPQVEDPIGRRWGVMVVIKSLQLLSTAIEAALKETSHYGAGVGGVSNGNPINSNSSNMLHIALVGINNQMSTLQDSGDEDQAQERINKLSKILKDNTITSHLNGAGVRVVSCIIQRDEGRSPMRHSFKWSSDKLYYEEDPMLRHVEPPLSTFLELDKVNLEGYNDAKYTPSRDRQWHMYTLVKNKKDPRSNDQRMFLRTIVRQPSVTNGFLFGSIDNEVQASSSFTSNSILRSLMAALEEIELRAHSETGMSGHSHMYLCIMREQRLFDLIPSSRMTNEVGQDEKTACTLLKHMGMIYMSMWCQDASLSVCQWEVKLWLDCDGQANGAWRVVVTSVTGHTCTVDIYREVEDPNTHQLFYRSATPTAGPLHGIALHEPYKPLDAIDLKRAAARKNETTYCYDFPLAFETALKKSWESGISHVAESNEHNQRYAEVTELIFADSTGSWGTPLVPVERPPGSNNFGVVAWNMKLSTPEFPGGREIIVVANDVTFKAGSFGPREDAFFDAVTNLACERKIPLIYLSATAGARLGVAEEIKACFHVGWSDDQSPERGFHYIYLTEQDYSRLSSSVIAHELKVPESGETRWVVDTIVGKEDGLGCENLHGSGAIASAYSKAYRETFTLTFVTGRAIGIGAYLARLGMRCIQRLDQPIILTGYSALNKLLGREVYSSQMQLGGPKIMATNGVVHLTVSDDLEGVSAILKWLSYVPPYVGGPLPIVKSLDPPERAVTYFPENSCDARAAICGIQDTQGGKWLDGMFDRESFVETLEGWAKTVITGRAKLGGIPVGIIAVETETVMQVIPADPGQLDSAERVVPQAGQVWFPDSAAKTAQALLDFNREELPLFILANWRGFSGGQRDLFEGILQAGSMIVENLRTYKQPAFVYIPKAGELRGGAWVVVDSKINPEHIEMYAERTARGNVLEAPGLIEIKFKPNELEESMLRLDPELISLNAKLLKETSASPSPWETAAAAETIRRSMAARRKQLMPIYTQVATRFAELHDTSARMAAKGVISKVVDWEESRAFFYRRLRRRLAEDSLAKQVREAAGEQQMPTHRSALECIKKWYLASQGGDGEKWGDDEAFFAWKDDPDKYGKYLEELKAERASTLLSHLAETSDAKALPNGLSLLLSKMDPAKREQVMDGLRQLLG

SEQ ID NO: 10689 - protein, 251 aa, Triticum aestivum
  unsure (1)..(251): unsure at all Xaa locations
  Clone ID: TRIAE-23APR03-C5955_1.p
MPTQFWNLPTADDVLVSRYPSYCRPSIWPADHLPELEIAFKALGKLMLEVGLMLARHCDLYVMQHGVGPYDGESLEQTISRSRCHKGRLLYYFPRQFSTQKEDGDSVSSWCGWHTDHGSLTGLTCGLFMKNSVEVPCPDSAAGLYIRTRDDRVVKVTFGEDELAYQIGETTEILSRGRLCATPHCVQAPSGVNASNVERSTFAMFMQPDWNETLNFPXEIPYHQELIPPNGALTFGEYSERLVNKYYQGKT

SEQ ID NO: 10690 - protein, 428 aa, Triticum aestivum
  Clone ID: TRIAE-23APR03-C59816_1.p
PVAQRHGRPGRVGTSLPDPPGRASRAVDLPFQVDGRGVDLRCPWGARREGTGGAGSAGEEGSDDDNTQGGEEGDGSTQESSDYEDDGRNCQVILAETNCPGKLYPESQAEAIELRWADWFFQRIVEHSKLCKEIMALGDDDETPFPPSPMKVFPEATALCILGAKSCHHRVYRTHDTSTTPSTLGYREPSHMLQFFSMRLSSFEASYSISVYGIFAIRDYLDRRRNYVFNRPRDDAVTIEKQDSFVVPLCSPCRGMYVSDKALVEVDLWVKKEGDESDDKQLLSAYAEIDVHAEANVMFYSRISGDNCNLDLKYIVLSESVEAVIQVYAKVDHPHHVRFTAFSTGYDDYPHRGVVLFDDKLFGHEKLFQHIVAVKANEELHVFLEVNGSVFQWTFQDEHVGAVISPDDSIFEYGQFFVRVIFAPKDCQ

SEQ ID NO: 10691 - protein, 251 aa, Triticum aestivum
  Clone ID: TRIAE-23APR03-C59974_1.p
MSFLAGRLAAQEGAYFLQESKLAAGRLAAKLPASARGPRPASPPPSPDVLPEILRHSVPIRPTPPPADSTLYGSTRWVLPQGGAETAGVSPDVLNPLRSYVALPQATFGPKRWELPTEQPYYSAATANERRRDMHPPPMDPEKLKAVIDGYSQVGKAFLAGTVLVFGGATAVLLYTANKLQLHSVDDVKAKGKDAVQPHADMIKEQIAPLRKWAEDTSRKWHYEADRESGEKSVLVRELSRALGSKTRPPN

SEQ ID NO: 10692 - protein, 602 aa, Triticum aestivum
  unsure (1)..(602): unsure at all Xaa locations
  Clone ID: TRIAE-23APR03-C6023_1.p
VFIHTRLWLFFYSLGARLCPRASPWIAAQRSVVGLLPCSSSLLVVRARERTSQMDFFTEYGEGNRYKIEEVIGKGSXGVVCSALDTHTGEKVAIKKINDIFEHVSDATRILREIKLLRLLRHPDIVEIKHILLPPSRREFKDIYVVFELMESDLHQVIKANDDLTPEHYQFFLYQLLRGLKYIHTANVFHRDLKPKNILANADCKLKICDFGLARVAISDTPTAISPKPYIATRRPPAVDGRNXTGRLLWQCQKIRVTGSGRVYSFQGHTFKHAILYIIXSRLHLPETIKLYAKSLWQASLLLSSTLVWLPARKKPVSCSQKILNTEPGELNLLERMLAFDPKDGPSAEEALADLYFKNMASVDREPSAQPITKLELEFERRRITKDDIRELIYREILEYHPNMLREFLEGAEPTNFMYPSAVDHFKKQFTFLEEHYAKGSTAAPPERQHNSLPRPSVIYSDNRPQGSDSRPQGAANITDDLSRCIIRDNAQKPRRDPASVGANRVPKGAAVARPGKVVGSALRYGNCSTSGTEQYEQRRVITSQGIVPNGVPSGSSYPRRNNTCKSETGEAERIDVSQAVPPKPYTGNKLPATVDGRNGHW

SEQ ID NO: 10693 - protein, 189 aa, Triticum aestivum
  unsure (1)..(189): unsure at all Xaa locations
  Clone ID: TRIAE-23APR03-C6024_1.p
RIASNHASDAGNQASNSHSASSKSEIGMVEFIGILNVKVXAGTKLAIRDMSSSDPYVVLTLGQQKAQTSVIKGNLNPVWNEELKLSVPQKYGPLKLQVLDHDMVSKDDLMGEAEIDLQPMINAAASFGDPELLGDIQIGRWLKSGDNALTADSAVMVTGGKVKQEVTLKLQHTESGEVTVEMEWMALNI

SEQ ID NO: 10694 - protein, 136 aa, Triticum aestivum
  Clone ID: TRIAE-23APR03-C60441_1.p
KKVGGFATNFTRGVFSKNFARSNFPFPFSGGRTFLGRGIYFGANLFGWALLITGAFSKGVSGWDPCYSPPPALFKPAGGGVYVGPLFGGVGSGAPLEGGGQRKLFFFFFGVCFFFLFFFFFFFFFFFFFFFFFFFF

SEQ ID NO: 10695 - protein, 262 aa, Triticum aestivum
  unsure (1)..(262): unsure at all Xaa locations
  Clone ID: TRIAE-23APR03-C60615_1.p
MPRRALTLLQHWTYLPALKVSSPFFFLFHFAFFTSIIIATSAGGPVAAGVFFFRAGPACTCVGVDGDGRRGWDGGRSEGAHAAPAWTSRPTSGCDSRTTGGVSTARGVTGGGGDAALAQEAELCVFDAVIASLSMILVSEIGDETFSIAALMAMRHPKSTVLSGAQSALVVMTVLSTGLGRIVPNLISRKHTNSAATVLYAFFGLRLLYIAWRSDSSASQNKEIEEVQEKLEAGQGKSXFRRVFSRLCTPICVDLPCFGGAS

SEQ ID NO: 10696 - protein, 247 aa, Triticum aestivum
  Clone ID: TRIAE-23APR03-C6066_1.p
MTAGPKSGGGGAAAARAAAAGPRTVLITGVSRGLGRALALELARRGHAVVGCGRSADPIRSLEAEMGSPSRHFLTVADVRSDSSMGELAKAVVERKQIPDIIVNNAGTINKNNKTWNVPAEEFDTVVDTNIKGTANVLRHFVPLMIQKKHGMIINLSSGWGRSAAAEVAPYCASKWAIEGLTRSLAKELPPGLAAIALSPGVVNTDMLTSCFGSSAALYQSTEQWAPKAATMILSLSLEDNGASLTV

SEQ ID NO: 10697 - protein, 513 aa, Triticum aestivum
  Clone ID: TRIAE-23APR03-C606_35.p
MAGTDSSASSRQSSFNSLAKDLELPLEQGCLTIVVLGASGDLAKKKTFPALYHLFEQGFLQSGEVHIVGYARTNLSDDGLRGRIRAYLKGASEEHVSEFLQLIKYVSGSYDSGEGFEKLNKEISDYEMSNNSGSSRRLFYLALPPSVYPSVCKMIRTYCMSPTSRAGWTRVIVEKPFGRDLDSAEELSSQLGELFEEDQLYRIDHYLGKELVQNLLVLRFANRLFLPLWNRDNVDNIQIVFREDFGTDGRGGYFDQYGIIRDIIQNHLLQVFCLVAMEKPVSLKPEHIRDEKVKVLQSVNPIKDEEVVLGQYQGYKDDPTVPDDSNTPTFASIVLRVHNERWEGVPFILKAGKALNSRKAEIRVQFKDVPGDIFKCKKQGRNEFVIRLQPSEAMYMKLTEFVQVKKPGLEMATEQSELDLSYGMRYQDVKIPEAYERLILDTIRGDQQHFVRRDELKAAWQIFTPLLHDIDAGKLKAVSYKPGSRGPKEADELSEKVGYMQTHGYIWIPPTLA

SEQ ID NO: 10698 - protein, 216 aa, Triticum aestivum
  unsure (1)..(216): unsure at all Xaa locations
  Clone ID: TRIAE-23APR03-C6071_1.p
MTVAAARCLILTPTISSSSAVLRLPRIARRRPLSCSASPLAVFATMESPPEGYRTNVGICLADPSLTXKIFSASRIDIPTAWQMPQGGIDPGEEPRAAAIRELREETGVRSAEVVAEAPNWLTYDFPADVKDKLNARWGTNWKGQAQKWFLFRLTGGDDEINLXGGDGSEKPEFSEWAWMTPQQVIEKAVDFKKPVYKETLKHFAPYLQSDPTASS

SEQ ID NO: 10699 - protein, 154 aa, Triticum aestivum
  unsure (1)..(154): unsure at all Xaa locations
  Clone ID: TRIAE-23APR03-C6077_2.p
RAERVGSKRFSSGGLPAVEVLAGGVSGLGWVEAGRRKFSFLKGVPRGKPRRQGPKVFRVQVGGRCHTVTAGRRATSKGPNLHGLLGGQSXGTIADYSYFAANKNKVVEWEENSLYGTLVNPKKYIPGTKMVFPGLKKPQARADLIAYLKKATSS

SEQ ID NO: 10700 - protein, 425 aa, Triticum aestivum
  unsure (1)..(425): unsure at all Xaa locations
  Clone ID: TRIAE-23APR03-C6091_1.p
ISRNHSNSRLGRAKPANRHELPWRYPPSPPSRYSPSPLPHFLLSPPYPLAPAAAPSSSSAASRPSAAFRPPLPLSPPPPRSRTFKLGRPCPVGRHANTDPKVPTKPKAAESSPDTSSRINDPNELNGAKQLDLPRKIRLQLPPLVTCVLRVWAALCGSAAYGCMDWKIXDVARSFGCMLMSGPSLKIYTQIISNNIKKASLNAEDGNGRRWLFPSAAVPCLSARRPXVLGAILFVGVVGVWLYHVFSATFRHAMGGSLLSYIYSAPPLKLKQQGGWPGFALGASYIGLPWWAGQALFGTLTPDIVVLTTLYSIAGLGIAIVNDFKSIEGDRTLGLQSLPVAFGMETAKWICVGAIDITQLSVAAYLLSTGKLYYALALVGLTIPQVILQFQYFLKDPVKYDVKYQASAQPFFVFGLLVTALATSH

SEQ ID NO: 10701 - protein, 216 aa, Triticum aestivum
  Clone ID: TRIAE-23APR03-C610_1.p
MAKTKQGKRDIDSYTIRGTTKVVRVGDCVLMRPSDTDNAPYVARVESLESDGRGSVRVRVRWYYRPEESKGGRRQFHGAKELFLSDHFDTQSAHTIEGKCIVHSFKNYTKLDNVGPEDFFCRFEYKAATGAFTPDRVAVYCKCEMPYNPDDLMVQCEGCKDWFHPTCMGMTIEQAKKLDTFLCADCAKENGAKRPSNSYPSSPSSDSKVEPKRRKW

SEQ ID NO: 10702 - protein, 493 aa, Triticum aestivum
  unsure (1)..(493): unsure at all Xaa locations
  Clone ID: TRIAE-23APR03-C6135_1.p
MKPDRKGGRVRSGTRTPPPNQPPRRIQTDPHPKSPKPSPATMGQGTPGGMGKQGGAPGDRGKPGGDGDKKDKKFEPPAAPSRVGRKQRRQKGPEAAARLPGVAPLSKCRLRLLKLDRVKDYLLMEEEFVAAQERLRPTEEKTEEDRSKVDDLRGTPMSVGSLEEIIDESHAIXVSSSVGPEYYVGILSFVDNDYDXPGCSKSFSNYKSHLVGFLQDEFDPMVSVMKVEKALLESYDEIGGLDALLKEIKEAAELPLTHPEVYEDIGIWSPKGVILYGEPGTGKTLLAKAVANSTSATFLRVVGSELIQKYLGDGPKLVRELFRVADELSPSIVFIDEIDAVGTKRYDAHSGGEREIQRTMLELLNQLDGFDSRGDVKVILATXNRIESLDPALLRPGRIDRKIEFPLPDIKTRRRIFQIHTAKMTLSDDVNLEEFVMTKDEFSGADIKXAICTESGLLALRERRMKVTHADFKKAKEKVMFKKKEGVPEGLYM

SEQ ID NO: 10703 - protein, 393 aa, Triticum aestivum
  unsure (1)..(393): unsure at all Xaa locations
  Clone ID: TRIAE-23APR03-C6142_1.p
MKRKNKEQRRADGITDRGSDSLETMRPNKKQRLGGGSGSDEETSPYLVVGHGSVSPAFSVFKVEPYTDGGGDTPVSIPRRLARLKCKHNMSFVPLRLKDRRWIVGVGGSSTENYYGPGTIIFDTEKQLVIRGPEPKSIKSHPILLPIDQKIYALSRSPSVKGPLDYLPWFEVLDLSQAQEVDGCLTNCXWSSLQRPPFFPWELIPRQYLCPPRVAVESYVPVGSHILVSVTGRVGTYAFDTKGSKKWVTVDDENNLPFSDGAIPHGXGLFLGLSSTTKAITGYKINIGTRSLSVVEIPVVSDLEDEELVGRSHNFLSLGIDSGFCLVTCWSVDESPYPPYHRAHIRVRTYRTDDFVESEGKCLVVSKQWMQVYKIRDLIRTLDAPCLVGVVYI

SEQ ID NO: 10704 - protein, 556 aa, Triticum aestivum
  Clone ID: TRIAE-23APR03-C6146_1.p
MASSSTVDCSMGKGKSLMNETDEKQLMESELQNLKLHDNMPNKTANNIIDVPNVVIPQDSTPHSIPQNAEASKRMENDISTGGPSAESTSYQFNENMWLSIEQTKNYFSRTSSSNGLVPCEWGRPTAPLWGGRVVGRRQVRCSRGSSLSADEYNTFMNIFERGSLLYCNMSFDALLSVRKQLEEFEFPCKAVNDGLWLQMLLCHRVQAIVADTCRNCCLTSNSCACKQAYVGTHSHYRQEHDRTSASGTAGSIYLADAQGDGNGMFSPVRVNVRGAVDGLAGIGRGNSNVPGAAWAPTRYVFSRVPYGLGSRNGQQPFANDESEPRVDHNGDIPGDGLTALVNLSQESNASHHQAESIFEAGMQTRYSGAATVSTPGGSSLQMQESKEHELGSSWESADNTAISLDMRTPLSHFPPFRFGVEFEDVHRLADGQVKHSAEVFYAGSLWKVSVQAFNDEDPHGRRTLGLFLHRRKAELLDPLRKAHMYIDPREKVTARYQLICPSKREVMIFGSLKQAGTLLPKAPKGWGWRTAILFDELADLLQGGALRIAAVVQLV

SEQ ID NO: 10705 - protein, 378 aa, Triticum aestivum
  Clone ID: TRIAE-23APR03-C6157_1.p
RPASRVHSHTPRAACHSPPPEHLCHSHGVPDLAPGAPPPPLLALRRRGGEEGARRRVQLAGQVRLLAPHSRFTRSQSRPTRCLPLPSSAALTAAVSAGSHGVPDLAPGAAPPPPLRALRRRGGEEGARRRRGQLAGQVRLLALPHRVQERRGEAAHGHRPRLRGRRPAHRRHVPGRHHRPRRRRRRADLPPEPPRHHQGARPGLLPRRRLRGGVGLQPHLPRLPPHPSGQGRRGGRVGELPPGAGAPAPARLLALGAGRFGGVSPCGVRRATGACPVPLHLPARVREGPGVPENRSSCRQLPGSATAPPACWSPCPGRHRLSPWQRAYYSSLRRRRWPGLAVPVAAPGLGRLLLRSTVRTPQAQAEMATLVAFINRDD

SEQ ID NO: 10706 - protein, 338 aa, Triticum aestivum
  Clone ID: TRIAE-23APR03-C6159_1.p
MRSSKTNGSVQKAGRVSHAQGEGPSWVLVAGGVLVSTLSVRLGCKLKQMFDTKKQNSTSRAKRRPGACELHSNLYRFDDETNCYCCVSDGGVEIKQAPASSLSKPDEPSLPLAKIPGPESSKENSGVMWTSSPDRLEDHRRPLQYSNSSGSPCVSESGSDIYIKREVIQKLRQHLRRRDEMIMEMQAQIADLKNSLSIEETQTANLQSQLDGANRDLFESDREIQQLRKIIADHCVAEALSRDKPLQAGNWQPDAANGHANGYADSSIDDPELHCIGIEKRNGEAERVEMLKREVGELKEVIEGKDFLLQSYKEQKVELCSKMRELQERLSAQVPNIL

SEQ ID NO: 10707 - protein, 275 aa, Triticum aestivum
  Clone ID: TRIAE-23APR03-C615_1.p
MAPGLYTDIGKKTRDLLYRDYCTHQKFTLTTCTPEGVAITAAGTRKNESIFGELQTQLKNKNLTVDIKANSESDLLTTFTVDEFATPGLKSILSLVVPDQRSGKLELQYLHEFAGINASVGLNPNPMVNLSGVFGSKELSVGVDVSFDTATSNFTKYNAALSLTYPDLIASLHLNNHGDTLTASYYHLVKSHSSTAVGAELSHNFPRNESTLIFGSQHSLDPHTSVKARFNNYGMASALVQHEWRAKSLVTISGEVDTKAIEKSTKVGLSLVLKP

SEQ ID NO: 10708 - protein, 329 aa, Triticum aestivum
  Clone ID: TRIAE-23APR03-C6160_1.p
MSGFGDGYVGTAQDAVKIRWLEKQRDAERRKIEELKNKNADGQPGLLQFGSSTSEILETAFKKETVGLVTREQYVEKRVNIRTKIEEEEKEKLQKLQQEEEELQMQKRKKRRVRGDPRLSFYDDIGNGSDEDEFENQETQKKQLGKDPTVETSFLPDRDRDAEEQAERERLKMQWSREQELIKNEPLSITYSYWDGTGHRRAIQVRKGDSIGEFLRAVQQQLAPEFREVRTTSVENLLYVKEDLIIPHQHSFYELIINKARGKSGPLFHFDVHEDVRTIADATKEKDESHAGIAWSRPRYEKNKHIFPASRWEIYDPTKKWERYTIHGD

SEQ ID NO: 10709 - protein, 128 aa, Triticum aestivum
  unsure (1)..(128): unsure at all Xaa locations
  Clone ID: TRIAE-23APR03-C616_22.p
MAAPRGAALVLAMVLAAMLVAPPATVHAISCSTVYXSTLMPCLQYVQAGRGRPXARGCCTGHPKTCLARGQQTSPEPPQHLAGGLKKVXANGASGGALHQPAPPALPSKCNVALPYKISPSVDCNSIH

SEQ ID NO: 10710 - protein, 272 aa, Triticum aestivum
  Clone ID: TRIAE-23APR03-C61_20.p
MSTDVAADVPAPEVEVAADHVVETTAEAAAGNAKPVKETKAKAAKAKKPSAPRKPRATPAHPTYAEMVSEAITALKERTGSSQYAIAKFVEDKHKAHLPGNFRKILSVQLKKLVASGKLTKVKASYKLSAAAAKPKPAAKKKPAAKKKAPAKKTATKTKAKAPAKKAAAKPKAKAPAKPKAAAKPKPKAAAKPKAKAAAKPKAAAKPKGRPAKAAKTSAKDAPGKKAPAAAAPKKAAARKPPTKRSTPVKKAAPAKKAAPAKKAPAAKKAKK

SEQ ID NO: 10711 - protein, 397 aa, Triticum aestivum
  Clone ID: TRIAE-23APR03-C6200_1.p
MAHLRLLLSHSRCHPHPHRLLPLFRFSTSNSGDPPPPTIKPVSYAPKPQAPPEEASSPDARSASPGWQDSPPRRFEQQPPNPPRQFTRQEVRFVKDAGPAIAPVSYPSRVAPLPEDRPAEDGAGEGVNEQDLRGEAERIEMNAERARRSIFGVPVEGETRPCHTHYLVCFGGPLMSSYSFAPQSVVWNRDVVLSSLPEENMVVSLMGGVYPRRGDQLVPGGLMSPQGSPVSAGLTLVYSRSSSHPACAPGKIKWFVLSLSFDKCIATPMFMPRLSKVARILGPRGLMPNPKLGSVTNDVSGAVKAAKSGRVDFKIDKTAIVHVGLGKINFSEESLRENIGAFVNALLLAKPVGLKKTSKYVGYVKKFTLSSTMGPGFPVTIPSLSAAADDYSKAHVS

SEQ ID NO: 10712 - protein, 711 aa, Triticum aestivum
  unsure (1)..(711): unsure at all Xaa locations
  Clone ID: TRIAE-23APR03-C6217_1.p
MGSDDSGRGSIAFFGTYRPPVPLDIYSCPADPPPSSRKDELHLTDGVSYNQNGRAIPAPALKELLTFLGKKNPALAAXEAAPTPDDAEKGRVAGLVFVSERDKGLETLHVTLVRPKGEGGAVKVLSLGDVYGADTFGGSRMEDSGCIAEXFKGGALAPVGHSLVYXSTKEPVXRRRTPWTVVYRTNLADGKTERLTXPPGQYDVSPAVSPSGKMVAVANFRGNKWTGEIERLNTDIAVMNVDKTAQGGLRRRILIRDGGWPTWGSDNVIFFHRGTGESPTNWAVFRYDIATKETVRVTPEAIDAMTPAAISETRVAVAAIRQKSRQAAMTTPREEAQYRHIEIFDVASPDRPAVQISQKIRPKGDHYNPFVADGGSRIGYHRVRTDDLVIGVCXFASRANSQLSCTTWMXIKITYQRTSHDMDVEXNLSAPTKSFDTKQKKTTSSGTCSPSRAAPHSGRRALTFAQYNAFPSSNAQGDKFVFRSTRDGGKEKFHKNLYIMEDAEXGEFGQGTVTRLTNGPWTDTHCSWSPKGDWVVFSSTREMPASAPEMAFLDAGYFAVYLVKVSDPTVVVRVVQSSATLAGHVNHPIFSPDMRSIVFASDLAAVSNEPISMPVFLHSVRPYGDILSVDLRDTDDITKNKDIQEFHRITHSRYEYSTPTWTKFATDDPNEQWNMLAAXRAAFKPACPYMYPDGGEGWHMAGHLTIPKRCC

SEQ ID NO: 10713 - protein, 533 aa, Triticum aestivum
  Clone ID: TRIAE-23APR03-C633_1.p
MGRVKRFYQDFIHIKLHSFCRISGYVVDSIAFVYRFVALHVHPFWIQLSYFLAIAILGSVLLMSLKPSNPDFSPPYIDMLFLSTSALTVSGLSTITMEDLSSSQIVVLTLLMLIGGEIFVSLLGLMLRVNHQDMQDLPSVKISSVPVELEELDLPNSMALCDESQLEEAAHAIPPKKCTELKRSRSVKCLGYVVFGYFAMIHVLGFLLVFLYITHVPTASAPLNKKGINIVLFSLSVTVASCANAGLVPTNENMVIFSKNSGLLLLLSGQMLAGNTLFPLFLRLLVWFLGRITKVKELRLMINNPEEVRFANLLARLPTVFLSSTVVGLVAAGVTMFCAVDWNSSVFDGLSSYQKTVNAFFMVVNARHSGENSIDCSLMSPAIIVLFIVMMYLPSSATFAPPSGDTKTTNENTKGKVKRGSLVQNLAFSPLGCNIIFVMVACITERRRLRNDPLNFSTLNMIFEVISAYGNAGLSTGYSCSRLHQLHPEIICQDKPYSFSGWWSDGGKFVLILVMLYGRLKAFTLATGKSWKV

SEQ ID NO: 10714 - protein, 467 aa, Triticum aestivum
  unsure (1)..(467): unsure at all Xaa locations
  Clone ID: TRIAE-23APR03-C636_107.p
MGSLEPFNRLVRLTARAFYDDISIKGDTQAKTSRGDNRGMAVVVLDGLTRRQWVREEDLAKSLKLHSKQLRRVLRFFEEEKLVTRDHRKESAKGAKIYSAAAAAAGDGQPTKEGEEKVKLHTHSYCCLDYAQICDVVRYRIHRMKKXTLKDELDSRNTVQHYICPNCKKRYSAFDALQLISYTDEYFHCENCNGELLAESDKLSSEEMGDGDDNARKRRREKLNDMQQRIDEQLKPLQAQLKRVKDLPAPEFGSLQSWERLNLGAFAHGDSAAAEAARNAQGQYNGTPMPYLGDTKVDVELAGSGVKAEGDESGRDGSALKVLPPWMVREGMNLTKEQRGESSNTSKGDEKSEVKDEKKQDSKEDEKSLQDEYLKAYYEALKKRQEEEDAKRMQQEGQAFSSEIHSERQVGMKAKREDENGEDEGVEWEEEQPAGNTSEEPYKFVDLNAEAPESGDDEEDEIDWEEG

SEQ ID NO: 10715 - protein, 328 aa, Triticum aestivum
  Clone ID: TRIAE-23APR03-C636_111.p
MASPDISFDIRPEFNSFDHLRSTGYISTDRPWLKLYGIRVPPVSPFNSLSSTPDLALIHQCLPDELLIEIFGRMSPYTLGRAACVCRKWKYTTRNPTFWRNACLKTWQRNGIEANFRMVQSLYDSSWRKMWVQRPRIRIDGLYVSRNTYIHTGITEWQFKKTVNVVCYYRYLRFFPTGKFLYKISPQKVKDVVKCMHLRASKGDSVFKGDYTLSGDGQIEMALLYPGHRYTLVRMRLRVRGTTIGANNRLDVLKILTTGVNGTELGNWKGNILELVEDWEENETHDPDVPAVSHSRGLTPFVFVPFEESDTSSAKPANGRKMDYFVPG

SEQ ID NO: 10716 - protein, 200 aa, Triticum aestivum
  unsure (1)..(200): unsure at all Xaa locations
  Clone ID: TRIAE-23APR03-C636_112.p
MARQGMVTALLLVVLAAGCCASAGAVAYLSKLPVTLDVTASPSPGQVLHAGEDVITVTWALNASQPAGKDADYKNVKVSLCYAPVSQKEREWRQXHDDLKKDKTCQFKVTQAXVYPGTGKVEYRVALDIPTATYYVRXAYALDASGTQVAYGQTAPASAFNVVSITGVTTSIKVAAGVFSAFSVASLAFFFFIEKRKKNN

SEQ ID NO: 10717 - protein, 176 aa, Triticum aestivum
  unsure (1)..(176): unsure at all Xaa locations
  Clone ID: TRIAE-23APR03-C636_76.p
MGGGHDMHGSPNGGVKGFVSSLVGGGKGHGYGSSYGQGHGYGGGHVQGYQQGYGGHGQSYEHGYGGHAQHGHGGYEHGYGGGHVQQXHGHGYGGHGQQHGYGGXHAQLGYPPAAGAYPPHXGYQAHGYAPAAYPSHGAHQGHMGSYHTGHGGGHHHGGKYHGGKYNGGKHGSKWIR

SEQ ID NO: 10718 - protein, 124 aa, Triticum aestivum
  Clone ID: TRIAE-23APR03-C636_77.p
GSSARRGGAAGDPCFCFRTESMAGRHTIVLVQPSPNKASRTFMDFSSLNQALDGICARYEKKIMDINPMARNFTYDITDLYNFIDGLADISALVYDHQLQAFLPYDRQWIKQKMFQHLKNQARQ

SEQ ID NO: 10719 - protein, 201 aa, Triticum aestivum
  Clone ID: TRIAE-23APR03-C636_89.p
MAGASSWSSSCSCTSSLGSLDDDDVFCVVKPGSPGAAAEGSVKFLCSYGGMILPRHPDGALRYVGGNNRVLSVDRSLQFHELQRKLTDMCGWEALSLRCQLPTEDLDALVSVTTNDDLGHLLEEYDAASRDRLQPLKIRAFLFPRSKTPPLSPSTPSSRPTPAYVRHHHQHHTARPPPARVHSGHRRPHQLLLLHNGSRLQ

SEQ ID NO: 10720 - protein, 531 aa, Triticum aestivum
  unsure (1)..(531): unsure at all Xaa locations
  Clone ID: TRIAE-23APR03-C636_99.p
MAAVAGAGRARGASLAAAVRAVAATARPASNAAAAAGVSVAAVILKGNDTPFGSVGWWAYAGISCFLVLFAGIMSGLTLGLMSLGLVELEILQRSGTDSEKAQAATILPVVQKQHQLLVTLLLCNAVAMEALPIFLDRIFHPVVAVVLSVTFVLAFGEVIPQAICTRYGLAVGANFVWLVRILMIMCYPIAYPIGKLLDCALGHNESALFRRAQLKALVSIHSKEAGKGGELTHDETTIISGALDLTEKTAQEAMTPIESTFSLDVDSKLDWEAIGKILARGHSRVPVYSGNPRNVIGLLLVKSLLTVRAETETPVSAVSIRRIPRVPADMPLYDILNEFQKGSSHMAAVVKARPKNPPADTTEPNMEAAGATQLTAPLLSNAEERAESVVVDIEAPHSRQTNGNKHHSVQQNDKPSNGVGRSSEDIEEGEVIGIITLEDVFEELLQEEIVDETDEYVDVHKRIRVAAAAAASSVARAPSVRRLTAQKASGTXSRQGQAGQPAGILKKPATEGDSNPSKQVNLVEPLENRR

SEQ ID NO: 10721 - protein, 234 aa, Triticum aestivum
  Clone ID: TRIAE-23APR03-C6378_1.p
MGSNDGPNSITSLPARRRLRWTEEVQEQLVEAAARHGGADKAPPKSLAGLDGSSGMQISEALKLQMEVQKRLHEQLEVQRQLQLRIEAQGKYLKKIIEEQQQRFGGGGIKSETPGAGATVTASSDQFPDSERTDPSTPAPTSESASQGAAFKRDSGSQTEAIKSPCHDEPLLTADSNCHPGSPTLSPKHERAAKRQRGSEAEFPEAELSLPQHIFESSSGPEFQQCAVPYYSGH

SEQ ID NO: 10722 - protein, 686 aa, Triticum aestivum
  unsure (1)..(686): unsure at all Xaa locations
  Clone ID: TRIAE-23APR03-C6388_1.p
MPATASGGARAEEAASALSLSSSAPFCMGTRPEELAARLVAGGPGGVGGPGGGRGEGGEGEHERVLALREIKNQIIGNRTKKLLYLRLGAVPAVVAALAEPGASPAALVQAAAAAGSFACGVDEGARAVLAAGAVAYPVIQLLPPDASVCDSPARALRMLHQSQQAPTLDVYHEKNMDFLLSLLDSENENYPGXGSIIETKICVGSEEYYDKDLILKELTVSTLSSLICDSEHSVQEQTLALVQNLLDGYVDSVNYVTGEDGMVINAISRQLNXRLPQARCASRVCRCLHRQNKTKLILVLLXLIEEPGHVGDEAPLALTALIKDSVELQKXAFSTNAVAKLSNHLLANTLETRRAVTILLALAELCSKQEESRSQLMSGQVSTLILDALKHDCVDIRVAACSCLKNISRSSKVLSAGRLSCDTVIAPLVQLLYDSSTSVQIAALGAICNIAVNLTPRKXPELLAGDLTTLGTMVXSMDPTLRLKSVLALRNIMFLMNPKDKDLCLKELTVSTLSSLICDSEHSVQEQTLALVQNLLDGYVGSVNYVIGEDGMVINAISRQLNSASATGVCIQGMLVLANMAAGNELNKEAVMDVTVPHRADRIKPSFVVNFLQSKDKQLRVATLWCILNLIYPNSESSSTRVARLQNAGVISQVKNMINDPCLDCKLRVRMVLEHCLDNAAAGFM

SEQ ID NO: 10723 - protein, 363 aa, Triticum aestivum
  Clone ID: TRIAE-23APR03-C64173_1.p
MSRTLVQPVGQKRLTNVAVVRLRKGGQRFEIACFPNKVVNWRDRVEKDLDEVLQSHNVYSNVSKGVLAKSKDLIRIFGTDDLVEICVEILEKGELQVSGKEREAQLSAQFRDIATIVMEKTISTETRRPYTMNMIERIMHEIHFAVDPNLTSKEQALRVIKKLIENPKYKIKRAPLTVRFIAPKSNLAGLMEKLDGWNAIVLSKDESADQSSVVCEIEPSILHSCEEKLKDVQGRVEVLSVSAHTEGGSSTDQYDNVEDNVEKAQPVPAKESGAVAQLSETMQKQSLSSEVESQGQAPGKPQKRCRECDVFMEDKLYRDHCKSGWHKHNYTRHKNGLPPLSQEECLMEMEMADSQRGLKDYDF

SEQ ID NO: 10724 - protein, 176 aa, Triticum aestivum
  Clone ID: TRIAE-23APR03-C64188_1.p
NQPDPTSRLPPPFRPIARRRRHGGGRRPDGDLTDDERKALRGSKFAPLPAPPPSSRPNPRMAHPGGPLTTNKAAALAKFLERKLQQPDGLDSLNPDLVNLAVKNAKETIKASKGEASTSGRVVRHVPSFEDSSEVSNQDDGEQRQEKKKKKKKKRKTKAAKDKLHNTSKKKKKLSL

SEQ ID NO: 10725 - protein, 128 aa, Triticum aestivum
  unsure (1)..(128): unsure at all Xaa locations
  Clone ID: TRIAE-23APR03-C64260_1.p
MLSMPGGKMAWLILFSISRKKRNNKISRRSRALSSQHLPRFFTGSYSSLPEAYRSASSKSSLSESSSESSSQDISKKSPPPPPSSSSSSSSSLXPSSSSETCPRNRAGHTEPPRQQQKLAGWIIAWYR

SEQ ID NO: 10726 - protein, 339 aa, Triticum aestivum
  unsure (1)..(339): unsure at all Xaa locations
  Clone ID: TRIAE-23APR03-C644_1.p
ERTGTAQVNPSADVDSLVAPGNKRQPYRXGPQMMPPFGTPLPYATMYVEGTLYKQPPRPPCSDPYSPYPVQAPNGTVQTPTSGAGGSETDKSNKNKRKTPLKRSKGSLGSLDVVTVKDKTPPAKPLVSSSNEGSSQSESGSGSYSGGSSTNSKSGSHTKDGSEHGPANDASNKGVTAQGTAVEPTQVSSGPVVLNPMMPYWPVPPPMPGQATGVSMGVDYWGAPTSVPMHGKAVAAPTSAPSSNSRDIVLSDPVIQDEREVKKQKRKQSNRESARRSRLRKQAEWEEVASRADLLKQENSSLKEELKQLQEKCDNLTSENTSLHEKLKALDSEKPNGNL

SEQ ID NO: 10727 - protein, 187 aa, Triticum aestivum
  Clone ID: TRIAE-23APR03-C64520_1.p
MYPTTPSDAYDRFSNGPPPTAPPPQQQPTYNHAMNQSHHARPAAGLARWSTGLFHCMDDPGNCLITCLCPCITFGQIADIVDRGTCSCAGSGAAYAAICATTGMGCLYSCVYRTKMRAHYDLDEGECPDFLVHWCCELCALCQEYRELKNRGFDMGIGWDANMERRNRGVTGGQVMGAPATPVGMMR

SEQ ID NO: 10728 - protein, 318 aa, Triticum aestivum
  unsure (1)..(318): unsure at all Xaa locations
  Clone ID: TRIAE-23APR03-C64545_2.p
MAHGGQPRRAPAARRPKPSASAPAPAADRKRKRAAAFKTATLKNQIRSTERLLRKDLPNDMRVAQEKKLEELKRRQENQTQEAMQRTIQLRDRKIKFFERRKIERMIRRLDKQQRINADEASNKLATLREDLEYVRFSPKKEKYFPLFTGGNTPDVVEKRNTWRKQIKENLIAAAANGKDLEETASDDDTLDVSEDDFFMSGSSSDEEADDELTDKSTKEPGASARAASGMSSDEKNQRQRDARVLMPPPRSLPPNRARSADKRAVSSSSNASTSTSGNSFKNRRASNLSGDHNSTLSSNSDAHXPRRKRRPKKKKQA

SEQ ID NO: 10729 - protein, 245 aa, Triticum aestivum
  Clone ID: TRIAE-23APR03-C65118_1.p
MDSTLFIIGVIGNIISVLVFISPIPTFWRIVRSGSTEDFEAAPYVLTLLNTLLWLYYGLTKPDGLLVATVNGFGAVMETIYLVLFLVYAADKGKRVKTAKLVAVLDIGFFGVVFAATTFAIDGLDMKIMVIGLICACLSVFMYGSPLTAVRRVIASRSVEYMPFFLSFFLFLNGGVWATYAVLDKDVFLGVPNGTGCFLGGIQLVIYAVYMNSKVASHSYGSDEAASLLSSEASKHGQHDASTRV

SEQ ID NO: 10730 - protein, 314 aa, Triticum aestivum
  Clone ID: TRIAE-23APR03-C65203_1.p
MAAAEVYSPTAAAAAQHQQRGKAATQAWQAVVGWIGFLLQVLLQILRGTPSCAQLLSFVGFRYPLLSSASAAPDQPSPEVAFMPLRSEIPADAAPVPAPPSEPLQRLTVVLDLDETLVSAYESSGLPPIVRTQAVEAGLHCFDMECISTDKDVEGKQKVNHVTVFERPGLHEFLQKTSEFADLILFTAGLEGYARPLVDIIDAHNRFKLRLYRPSTVTTEYREHVKDLSCLSKDFSRIVIVDNNPFSFIVQPLNGIPCVPFSAGQHSDDQLMEVIFPLLKHLSVQRDVRPALYERFHMPEWFQKHGIPRTDQAL

SEQ ID NO: 10731 - protein, 178 aa, Triticum aestivum
  Clone ID: TRIAE-23APR03-C65208_1.p
GGAGLACQEELLEQLEHHHQAQSPSPDHAAAGTGGGHHIHIPGWYSVAFTGVPRLTRPLHAQWARLRRPGQLLVEVLPQHVHLVLLHDGEPLGAPPRPRVDVVVGLLGGREAPPVMVVRSRVDRDDEPWRRRSEVRERELLGAARHRWHGRECEVLHHGCVCLCRTNLWTTLGLCLND

SEQ ID NO: 10732 - protein, 77 aa, Triticum aestivum
  Clone ID: TRIAE-23APR03-C654_21.p
MSYYNQQPPVGAPPPQGYGDKAGYPPPGYPPAGYPPPAQGYPPAGYPQQGYPPQYAQQPPPHQQQQQSSGPSFMEGW

SEQ ID NO: 10733 - protein, 340 aa, Triticum aestivum
  unsure (1)..(340): unsure at all Xaa locations
  Clone ID: TRIAE-23APR03-C65603_1.p
MRAAATSTAFSLLSPSRLRTSAPTTTSLPYRRRPRIAAMATAAASFRPEAARSPPAVEPPAPPLSKFKVALCQLSVTADKARNIARARAAIESAAADGAKLVLLPEIWNGPYSNDSFPEYAEDIEAGGDAAPSFSMMSDVARSLQITLVGGSISERSGNSLYNTCCVFGSDGKLKGDIPEMIPFQKSNTRKAYHDLTVVXTTDVDRIGIGDLHMTCLFXELAMMYAARXAHLLCYPGAFNMTTGPLHWELLQRARAADNQLFVATCAPTRDTSSSYVAWGHSTLVGPFGEVIDTTEHDESTIIAEIDYSLIEQRRQFLPLRHQRRGDLYQLVDVQGSGSK

SEQ ID NO: 10734 - protein, 76 aa, Triticum aestivum
  unsure (1)..(76): unsure at all Xaa locations
  Clone ID: TRIAE-23APR03-C656566_1.p
NANYNLHKQLMQRKLRLQLAKAEHSTLGSYEEKQSSKAGHIRPSKMAMLQEHLXXKGNNXFHLNHRXGTLPPRHGS

SEQ ID NO: 10735 - protein, 102 aa, Triticum aestivum
  Clone ID: TRIAE-23APR03-C65668_1.p
GHRRGLEQQHRYHHHHWKGQGWGCLEQQHQLEGQGQGCFEQQERPRAESQLVVSSPLLPISKLALFTASGIRSSWLDEAQFKKARHPDVCISKCASIPMEGR

SEQ ID NO: 10736 - protein, 412 aa, Triticum aestivum
  unsure (1)..(412): unsure at all Xaa locations
  Clone ID: TRIAE-23APR03-C6567_5.p
MGKPRAMVALAAALALLLSCSGVVVRGQDTERIEGSAGDVLEDDPVGRLKVYVYELPTKYNKKMVAKDSRCLSHMFAAEIFMHRFLLSSAIRTMNPEEADWFYTPVYTTCDLTPWGHPLPFKSPRIMRSAVQFISSHWPYWNRTAGADHFFVVPHDFGACFHYQEEKAIERGILPLLRRATLVQTFGQKDHVCLKEGSINIPPYAPPQKMKTHLVPPETPRSIFVYFRGLFYDTANDPEGGYYARGARASVWENFKNNPLFDIXTDHPATYYEDMQRAIFCLSPLGWARGSPRIAEAVVFPVIIADDIVLPFADAIPWDEIGVFVAEDDVPKLDTILTSIPMEVILRKQRLLANPSMKQAMLFPQPAQPGDAFHQILNGLARKLPHSKSVYLTPGQKALNWTQGPKGDLKPW

SEQ ID NO: 10737 - protein, 160 aa, Triticum aestivum
  Clone ID: TRIAE-23APR03-C65732_1.p
MAGASFFDRMVSQLRSTSKYYTGYPKDLGPSRIIPFTSERQFVQLLHEGRPVVVAFTIKCTYTQHLDKVLEKAAATFYPHIKFVRVECPKYPGFCLTRQKTEYPFLEVFYNPEQAANPGKIVDPSITKYSAKVLPFNYDQSVYGFREYFKKYGFKYSEAN

SEQ ID NO: 10738 - protein, 377 aa, Triticum aestivum
  Clone ID: TRIAE-23APR03-C65789_1.p
MVVGSFITRALILVLGQRQTPSFEFPPPLPSVRLAADPARDGGPLPPGTSWKLPRLPPLLRQQPASSPPPRASTSRCRPVACSGRKGVKMVVGSFITRALILVLGYAYPAYDCYKTVELNRPEIEQLRFWCQYWILLAMLTVFERVGDNFISWLPMYSEAKLAFIVYLWYPKTQGTSYVYESFFKPYIAKHESEIDRNLLELRTRASDIAVTYFHKVADYSQSRFHEILQYIASQSQGSRSQAQQQQQRPPPPRTRMANPAPPPVPAPTAPPMPPQAAQVPPTPPRMQVQDKGPVPVAPPGAVPPVQQQTPSCPGPVAGNSPPKSEDMLVDQSGPSTSNVPPRPTMPEDEETLIQEAIRLTRGRLRRRMGGSGPPSN

SEQ ID NO: 10739 - protein, 599 aa, Triticum aestivum
  Clone ID: TRIAE-23APR03-C657_1.p
MGSIPNYCSYQTNSVGSLKLSPHIQFQQSCNNEVMFLSMRNKTQLAKRRATNYGTHRNSSRTPAPIVCSTGMPIIFVATEVHPWCKTGGLGDVVGGLPPALAAMGHRVMTIAPRYDQYKDTWDTNVLVEVIVGDRTETVRFFHCYKRGVDRVFVDHPMFLEKVWGKTGSKLYGPTTGTDFRDNQLRFCLLCLAALEAPRVLNLNNSEYFSGPYGENVVFVANDWHTAVLPCYLKSMYKQNGIYVNAKVAFCIHNIAYQGRFPRVDFELLNLPESFMPSFDFVDGHVKPVVGRKINWMKAGITECDVVLTVSPHYVKELTSGPEKGVELDGVLRAKPLETGIVNGMDVVDWNPATDKYISVKYNATTVAEARALNKEILQAEVGLPVDSSIPVIVFIGRLEEQKGSDILIAAIPEFLEENVQIIVLGTGKKKMEEELMLLEAKYPQNARGIAKFNVPLAHMMFAGANFIIVPSRFEPCGLIQLQGMRYGVIPICSSTGGLVDTVSEGVTGFHMGSFNVEFETVDPADVAAVASNVTRALKQYKTPSFHAMVQNCMAQDLSWKGPAKKWEEALLGLGVEGSQPGIEGEEIAPLAKQNVATP

SEQ ID NO: 10740 - protein, 307 aa, Triticum aestivum
  unsure (1)..(307): unsure at all Xaa locations
  Clone ID: TRIAE-23APR03-C65819_1.p
MRNLLSNSFELNKEERPPGNVDIELGLQGDLSGSAQPGFDGFYEQVREIDKLLETLTKLLKDLQNSSEESKIVTKASAMKDIDRRNAKDDYEVTTVAXSIKHXLQQLNKENLANREKPVFHKGSSVDRSRTSVTITLTMRLRERISEFQTLREXSQTEYREVVERRVFTVYGRAXADEETIDKLIETGDSEQIFQRAIQEQGRGRVLDTLQEIQERHDMVKEIETKLLELQQIFLDLSVLVEAQGEILNNIEVQVTGAVEHVQTGTNLLQKARVLQKNTRKWTCIAIIILLIIVLVIVLSLKPWAKK

SEQ ID NO: 10741 - protein, 393 aa, Triticum aestivum
  unsure (1)..(393): unsure at all Xaa locations
  Clone ID: TRIAE-23APR03-C65850_1.p
YGAGRAFEANLKVISPMLVVIFKPADALFLEEAKHIADRLLPAWDTTSGIPYNSINLAHGRAHNFGWTNGDSILADSGTEQLEFIALSQKTGDPKYQLKAENVIRQLQKIYPSDGLLPIYINPQSGQASYSTITFGAMGDSFYEYLLKVWIQGNKTGAVKHYRQMWETSMEGLISLTRQTTPSNYTYICEKSGGSLSHKMDELACFAPGMLALGASGYGPEKAKQIMNLAEELARTCYNFYQTTPTKLAGENYYFHAGQDMNVGTSWNILRPETVESLMYXWRLTGNKTYQDWGWDIFQAFEKNSRIASGYVGLRDVNSGEKDDKMQTFFLAETLKYLYLLFSPPSVVSFDEWVFNTEAHPLRIVPTHGSNGQSIETATPVVRPFGRKQGKQG

SEQ ID NO: 10742 - protein, 435 aa, Triticum aestivum
  Clone ID: TRIAE-23APR03-C6596_1.p
TLTPLHHCSRSLRSALPLPPNQGVPGAAAAATARRASMAFLFNKFQEAIKTLAKSPSFARDPRHLQFDADVNRLFLYTSYNRLGEHSEEKDAEEIIDLASKASVTDQQKQVQGNVHYQLKHICKSMDNILRPDTKDPSQSSSDAYNNSRRSGLSLAVDTRVAAANKPAVPATRPLTQAELSNKFRDQFGYTLDIKPSLIPHKDAGQGLFLSGEANIGAVLAIYPGVIYSPAYYRYIPGYPRIDACNSYLITRYDGTIINAKPWHLGGETREIWDGSDPVDYNTTPPKSPESNSDRAWRMLNKPLQKSGTENFGDVLERRNPLAFGHFANHPPGGSTPNVMICPYDFPLTEKDMRVYIPNIAFGGEEPVTMKRFGSFWFKSRAPGKETGESPVLRTLVSTRSVCDEELYLNYRYSSKGRPDWYTPVDEEEDKRRWS

SEQ ID NO: 10743 - protein, 352 aa, Triticum aestivum
  Clone ID: TRIAE-23APR03-C66028_1.p
MEKGDGPALQPLLCLAWLAATLPILAAALPIPAAAGGRLLHSLLSAFSSRGKTVRPSSSSSSSSSKAKFTVPQKYFLHFYVVGVAVTTSLLLAICFYAYMKMTPLLPEPSSYSTIASHLIGSNSFSFGSVLSRTMEHKYRVWRTVFVLLLMEIQVLRRLYETENVFHYSPSARMHIVGYLTGLFYYTAAPLSLASSCLPEAIDFIRGQIVEFIVKGRARMPDLVIDSPSLLKPLLKLGWCQWIGAIVFIWGSLHQIRCHAILGSLRENKDSDEYVIPCGDWFSRVSCPHYLAELVIYLGMLIASGGSDISVWFLFIFVITNLSFAAVQTHRWYLQKFEDYPRSRYAIIPFVL

SEQ ID NO: 10744 - protein, 366 aa, Triticum aestivum
  Clone ID: TRIAE-23APR03-C66030_1.p
MSDGKDTLDLSALGAAVPNAAELSAEDKANLVESIKNTLQGLAARHTDVLESLEPKVRKRVEALREIQSQHDEFEAKFFEERAALEAKYQKMYEPLYSKRHDVVNGVVEAEGVTKDSGEAAPDEKEEKGVPDFWLNAMKNHEILAEEIQERDEEALKYLKDIKWYRITEPKGFKLEFHFNTNPFFKNEVLSKTYHMIDEDEPILEKAIGTEIEWYPGKSLTQKVLKKKPKKGSKNTKPITKIENCESFFNFFSPPQVPDDDEEIDEDTAEQLQNQMEQDYDIGSTIRDKIIPHAVSWFTGEAAQDEDFDGIMDDDEDDDEDDEEDEDEDEDDEEDEDDDDGDKKKGGRVPAGEGQAGERPAECKQQ

SEQ ID NO: 10745 - protein, 361 aa, Triticum aestivum
  unsure (1)..(361): unsure at all Xaa locations
  Clone ID: TRIAE-23APR03-C66044_1.p
MAGATAAPPLDISAAGPPPAFTGKGPLPAXPPPSPVPCRPQYRPQSLAHVAADHNIDETTEGSRLTNRLPHWLLYGPHGTGKTSTIQAVARKXLYGSKYGNMILEXLNASDERGIGVVRQQIQDFASAHSLSFGAKPAVKLVLLDEADAMTKDGQFALRRVIEKYTRSTRFALICNHVNKIIPALQSRCTRFRFAPLDGSHVTERLRHIIKSEGLDVDEGGLTALVRLSNGDMRKSLNILQSTHMASQQITEEAVYLCTGNPMPKDIEQIAFWLLNEPFSTSFKHIADMKMRKGLALIDIIREVTMFVFKIKMPSNVRVKLINDLADIEYRLTFACNDKLQLGALISTFTTARTAMVAAAD

SEQ ID NO: 10746 - protein, 126 aa, Triticum aestivum
  unsure (1)..(126): unsure at all Xaa locations
  Clone ID: TRIAE-23APR03-C66115_1.p
MSGNNFGDSMGWGRSSGSRKGKRGGSSSGGSGADKPKQPQRGLGVAQLEKIRLQSEMAEYFHPLGGQPPSLIHRTASLNXGGYAGVNVLALIVPIVPLPCYRRLVGLPGPSEFWDGIWGERRRSIW

SEQ ID NO: 10747 - protein, 453 aa, Triticum aestivum
  Clone ID: TRIAE-23APR03-C66182_1.p
MCSNQAVGERLMPSSHQLRYTVINRATPVYQPAAPTKDDGLSRCRVCHCVEPDLRGESALGFLGIVPPSPDPSVDKDPSNDTTKTSTTKDAPKFLEFISPEGEIFKCATDIESGHLQRQDDVVNLGCSCKNELALAHYACALKWFISHGSTVCEICGNVATNVRPEDFNMVLASLKDYEALRERTSTGDLSYLHYRADAFVDPVALAAVRRQRLCEISSWFNPHNTHFVFSQRHNEEVPVSPSNNSVDYSVTAARAAHARRKFGSSGAFVAIALGFVLLAWFVAPHVGKRAAAIILHMLLGGLCSLTIIISLRFVSLPEDPVWVDTMLGDPVRVLVPRVWSVGLSNPHRPPRVMMISSVPSVSRREELGPRRKSSVHESVRYRTPVYIRRELYHGRTIFSLAGVCEMYNMFGQENKGSYVTECCGFRHSWSGTGLASVAKQYSNVCKKKKKKI

SEQ ID NO: 10748 - protein, 341 aa, Triticum aestivum
  Clone ID: TRIAE-23APR03-C6639_1.p
MILFEVVAAELSILGNRLRSMVVAEVPKLESAAEYFFKVGAEGKRFRPTVLLLMASALKFPIPESTDVGVFSILASKLRTRQQNIAEITEMIHVASLLHDDVLDDADTRRGVTSLNCIMGNKLSVLAGDFLLSRACVALAALGNTEVVSLMATAVGHLVTGETMQMSTSREQRRSMEYYLQKTYYKTASLISNSCKAVAILAGHTAEISVLAYEYGRNLGLAFQLIDDVLDFTGTSASLGKGSLSDIRHGIITAPMLYAMEEFPQLQDVVDQGFDNPANVEIALDYLQKSRGIERTKELAQEHVNLAVKAIESLPDSDDEDVLISRRALIDITQRVITRTK

SEQ ID NO: 10749 - protein, 263 aa, Triticum aestivum
  Clone ID: TRIAE-23APR03-C66411_1.p
MGRRRAGGGGRGGGRGRGRGGEGRGGGEEEDLQLHKAARSGDAAAAESLCESNPLALNSRDRLSRTPLHLAAWAGHVDVVKCLCKHKADVGAAAMDDTAAIHFASQKGHLEVVRELLASGASVKAKNRKGFTALHFAAQNSHLDLVKYLVRRGVDITTKTNAGQTALHVAENDDVRAFLKECEQSLKKGVELPSEKKDDSVAEKADDGKVSGEDRKDGVDAGQGEKRKSEEIGAGTRPPEVKKAKVSLSHLENDMEEEDEADE

SEQ ID NO: 10750 - protein, 141 aa, Triticum aestivum
  Clone ID: TRIAE-23APR03-C66436_1.p
DLQRPGRPAVGHATLPLPSNFWGADDPARYPAVGIGGGGRCRSPAGSLSNNIRRPPPRSGVPSSTPLLSHVATSTEPPSTHLIGPSGRRPPRHLDGPPPLLTLLHGRLRTVTISSARFQQKESGECLSLTTVGFPTKGLAV

SEQ ID NO: 10751 - protein, 362 aa, Triticum aestivum
  Clone ID: TRIAE-23APR03-C664_1.p
MEEIGHHFGLGATAHGQHHSQLPWGSSPLSAVIAPPPQQQQQQQSAGYLAHSPLSLNTAPPSGSHGGGSGCSNPVLQLANGSLLEACAKAAKEPSSSSYAADVEAIKAKIISHPHYSSLLAAYLDCQKVGAPPEVLARLTAVAQDLELRQRTALGSFGTATEPELDQFMEAYHEMLVKYREELTRPLQEAMEFLRRVETQLNSLSISGRSLRNILSSGSSEEDQEGSGGETELPEIDAHGVDQELKHHLLKKYSGYLSSLKQELSKKKKKGKLPKDARQQLLSWWEMHYKWPYPSESQKVALAESTGLDLKQINNWFINQRKRHWKPSDEMQFVMMDAYHPPNAAFYMDGHFVNDSGLYRFG

SEQ ID NO: 10752 - protein, 337 aa, Triticum aestivum
  unsure (1)..(337): unsure at all Xaa locations
  Clone ID: TRIAE-23APR03-C6651_1.p
SASTRRVLKERCRHPGTRGDRTSRLSRIVLXGRKLVAPGLPRKAGLAKLTGLAGETNVRGGRQQNXLDVLTNEVFDNTLDGGGRTCVVVXAADDISRLXDPKLQLGKYCVCLKTLEMDPPSTRAAASSNEGTLALGSHRXSNEANDTRGLVEQGTDPLGKGACITPCSHSVIRMPASFTRNPTTADFVKAIRLARAPKVLGNDXDKQDVLSNEVTDQAQGRRGNCRYPTDGSSPKSXLKYIGSMVADDHRTLLYGGIFLYPADKKSPSGKLRVMYEVFPMSFLMEEAGGQSFTGKGRSLDLIPTDIHERSPIFLGSSDDVEEIKALYAEEAKKEGSA

SEQ ID NO: 10753 - protein, 514 aa, Triticum aestivum
  unsure (1)..(514): unsure at all Xaa locations
  Clone ID: TRIAE-23APR03-C66573_1.p
MATAVHQLSFSAPGAGGRGRQSRASASASXTDRXEVVSPNRXRVPLPKVPGEHGPRPXGALEDRLEYFYAPGGRDGFFAARVRAHRSTVVRLNMPPGPFVAXDPRVVALLDAASFPVLFDTSLVDKTDLFTGTFMPSTDLTGGYRVLSYVDPAEPNHAPLKSLLFHLLTHRRQHVIPTFREVYGGLFGRMENDLARVGKADFGNYNDDAAFGFLCQALLGRDPVDSPLRDEGPKLVAKWLLFQISPLLSLGLAGLPTLVEDGLLHSFRLPPALIKKDYGRLADFFRDAGKAVIDEGERLGIAREEAVHNILFAMCFNSFGGIKILFPSLVKWLGRAGGRVHGRLATEVRAVVRANGGEVTMRALAEMPLVKSAVYEALRIEPPVAMQYGRAKRDMVVESHDYGYEVREGELLFGYQPMATKDPRVFPRAEDYVPDRFLGEDGERLLRYVVWSNGPESATPTLQDKQCAGKDFVVLIARLLVAELFLRYDSFDVQVGSSPLGSSVTITSLKKATF

SEQ ID NO: 10754 - protein, 75 aa, Triticum aestivum
  Clone ID: TRIAE-23APR03-C66613_1.p
MGDQSLSLGILIDIVDEQWMRDTLPADDIPVPPAMAVKTEDTEDPAPARIILYPTDQESQPAQGDVWRDFALENI

SEQ ID NO: 10755 - protein, 843 aa, Triticum aestivum
  Clone ID: TRIAE-23APR03-C669_23.p
MVKFTAEELRGIMDKKNNIRNMSVIAHVDHGKSTLTDSLVAAAGIIAQEVAGDVRMTDTRADEAERGITIKSTGISLFYQMTPESLEMYKGDRDGDEYLINLIDSPGHVDFSSEVTAALRITDGALVVVDCIEGVCVQTETVLRQALGERIRPVLTVNKMDRCFLELQFEGEEAYQTFSRVIENANVIMATYEDVLLGDVQVYPEKGTVAFSAGLHGWAFTLTNFAKMYASKFGVDEVKMMERLWGENFFDPATKKWTTKNTGTATCKRGFVQFCYEPIKQIIATCMNDQKDKLWPMLKKLGVTMKNDEKDLMGKALMKRVMQTWLPASRALLEMMIFHLPSPSKAQRYRVENLYEGPLDDVYANAIRNCDPDGPLMLYVSKMIPASDKGRFFAFGRVFAGRVATGMKVRIMGPNFVPGQKKDLYVKSVQRTVIWMGKKQESVEDVPCGNTVALVGLDQFITKNATLTNEKEVDACPIRAMKFSVSPVVRVAVQCKVASDLPKLVEGLKRLAKSDPMVLCTIEESGEHIIAGAGELHLEICLKDLQDDFMGGAEIIVSPPVVSFRETVLEKSCRTVMSKSPNKHNRLYMEARPLEEGLAEAIDDGRIGPRDDPKVRSKILSEEFGWDKDLAKKIWCFGPETTGPNMVVDMCKGVQYLNEIKDSVVAGFQWASKEGALCEENMRGICYEVCDVVLHTDAIHRGGGQVIPTARRVIYASQLTAKPRLLEPVYLVEIQAPENALGGIYGVLNQKRGHVFEEMQRQGTPLYNIKAYLPVIESFGFSSTLRAATSGQAFPQCVFDHWDVMASDPLDPGTQSATLVTEIRKRKGLKEQMTPLSDFEDKL

SEQ ID NO: 10756 - protein, 843 aa, Triticum aestivum
  unsure (1)..(843): unsure at all Xaa locations
  Clone ID: TRIAE-23APR03-C669_28.p
MVKFTAEELRGIMDKKNNIRNMSVIAHVDHGKSTLTDSLVAAAGIIAQEVAGDVRMTDTRADEAERGITIKSTGISLFYQMTPESLEMYKGDRDGDEYLINLIDSPGHVDFSSEVTAXLRITDXALVXVDCIEGVCVQXETVLRQALGERIRXVXXVNKMDRCFLELXVEGEEAXQTFSRXXXNANVIMATYEDVLLGDVQVYXXKGTVAFSAGXHGWAFTLTNXAKMYASXFGVDEXKMMERLWGENFFDPATKKWTSKNTGTATCKRGFVQFCYEPIKQIIATCMNDQKDKLWPMLKKLGVTMKNDEKDLMGKALMKRVMQTWLPASRALLEMMIFHLPSPSKAQRYRVENXYEGPLDDIYANAIRNCDPDGPLMLYVSKMIPASDKGRFFAFGRVFAGRVATGMKVRIMGPNFVPGQKKDLYVKSVQRTVIWMGKKQESVEDVPCGNTVALVGLDQFITKNATLTNEKEVDACPIRAMKFSVSPVVRVAVQCKVASDLPKLVEGLKRLAKSDPMVLCSIEESGEHIIAGAGELHLEICLKDLQEDFMGGAEIIVSPPVVSFRETVLEKSCRTVMSKSPNKHNRLYMEARPLEEGLAEAIDDGRIGPRDDPKVRSKILSEEFGWDKDLAKKIWCFGPETTGPNMVVDMCKGVQYLNEIKDSVVAGFQWASKEGALAEENMRGICFEVCDVVLHTDAIHRGGGQVIPTARRVIYASQLTAKPRLLEPVYLVEIQAPENALGGIYGVLNQKRGHVFEEMQRPGTPLYNIKAYLPVIESFGFSSTLRAATSGQAFPQCVFDHWDIMSSDPLEAGSQSATLVTEIRKRKGLKEQMTPLSDFEDKL

SEQ ID NO: 10757 - protein, 897 aa, Triticum aestivum
  Clone ID: TRIAE-23APR03-C674_1.p
MSSRSGAARMRACGPWGEGGSGVVGDAHALEREMSRDGSHYSLSSGILPSLGARSNRRVKLRRFIISPYDRRYRLWETFLIVLVVYSAWVSPFEFGFIRIPTGGLAATDNAVNAIFAVDIILTFFVAYLDRLTYLLEDDPKRIAWRYATSWLVLDVASTIPSEIARRMLPSKLRSYGFFNMLRLWRLRRVSSLFARLEKDRHFNYFWVRCAKLICVTLFAVHCAACFYYLLADRYPDPKETWIGNTMPDFHSKGLWIRYVTSVYWSITTLTTVGYGDYHAENIREMIFNIFYMFFNLGLTAYLIGNMTNLVVHGTSRTRKYRDTIQAATSFALRNQLPPRLQDQMISHLSLKFRTDSEGLQQQETLDALPKAIRSSISQYLFLNLVQNIYLFQGVSNDLIFQLVSEMKAEYFPPREDVILQNEAPTDFYILVSGSVELVEVPNGAEHGAEQVVGVAKSGEVIGEIGVLCYRPQLFTVRTRSLCQLLRMNRTAFLSIVQSNVGDGTIIMNNLIQLLKEQTDGVMVGVLKEIESMLARGRLDLPITLCFAVTRGDDHLLHQLLKRNLDPNESDQDGRTALHIAASKGNEQCVKLLLEYGADPNARDSEGKVPLWEAVYAKHDTVVQLLVKGGAELSSGDTSLYACTAVEQNNIELLKQILKHVIDVNRPSKDGNIPLHRAVCDGNVEMVELLLRHGADIDKQDSNGWTPRALAEQQGHEEIQNLFRSVIAPRKYTSNGRVTPMLLGRFSSDPSMQKVIHEDVEQQPSKVLPQRRKVSFHNSLFGVISSAHPRRETDHLLSRGLAATGGPTYPQAHHNPLIRVTISCPEMGNTAGKLVILPGSIKELLQLGAKKFDMMPTKVLTIEGAEVDEVELIRDGDHLVLASDDWVPDDTQIRGKN

SEQ ID NO: 10758 - protein, 248 aa, Triticum aestivum
  Clone ID: TRIAE-23APR03-C6759_1.p
MEPDQSGTGQTSPRGNDWEVVQLTASNYASAPGPARTEPSDEESEGQVYGAEGGDSAAAALLMCGHFSVPQNEAENLLMGADTSIEQQEARGSQYAVSDKGDDGDREEEPQEKLKDDVLDRIPSFDKGKSLPSVHPEFVASRSRKTSRTVLEPHATCGGQKQLISLYRSAKESNKLWPIVVAAAALMGMAYFRRRWQKGKLQLQQVKLQPASSKERINQATVPLNRIKDILVAGNHPSPATHGNARLG

SEQ ID NO: 10759 - protein, 67 aa, Triticum aestivum
  unsure (1)..(67): unsure at all Xaa locations
  Clone ID: TRIAE-23APR03-C676802_1.p
WLXGLWYSQPIRVQILMLAFISGFISGFPVMRIQWEETFPLMTKCLRRLRKFQDDMAAQSFGGALNS

SEQ ID NO: 10760 - protein, 438 aa, Triticum aestivum
  Clone ID: TRIAE-23APR03-C6774_1.p
MGSMELSTAPENGTAAAAAACNGGAAPANGGVERRLRSSAASASWAAHLPLEVGTRVMCRWRDQKPHPVKVIERRKSAASSSPADYEYYVHYTEFNRRLDEWVKLEQLDLDTVEADVDEKVDDKATSLKMTRHQKRKIDETHVEQGHEELDAASLREHEEFTKVKNIAKIELGKYEIDTWYFSPFPPEYNDSAKLFFCEFCLNFMKRKEQLQRHMKKCDLKHPPGDEIYRCGTLSMFEVDGKKNKVYGQNLCYLAKLFLDHKTLYYDVDLFLFYILCECDDRGCHMVGYFSKEKHSEEAYNLACILTLPPYQRKGYGKFLIAFSYELSKKEGKVGTPERPLSDLGLLSYRGYWTRVLLEILKKHKSNISIKELSDMTAIKADDILSTLQSLDLIQYRKGQHVICADPKVLDRHLKAAGRGGLDVDVSKLIWTPYKEQG

SEQ ID NO: 10761 - protein, 210 aa, Triticum aestivum
  Clone ID: TRIAE-23APR03-C68120_1.p
MASGLVTEDVTVGRLVRIRRTVMHMLRDRGYLVVEHELSMTRRDFQRKYGESFHREDMLINKCKKNDPNDQIYVFFPNDEKVGMKHIKKYVEMMNAEKVSRAILVVQQNLTPFAKSFLQELEPKIHLEVFQDAEMLINIKEHVLVPEHQVLANEEKKTLLARYTLKETQLPRIQITDPIARYYGLKRGQVVKIIRPSETAGRYVTYRYVV

SEQ ID NO: 10762 - protein, 492 aa, Triticum aestivum
  unsure (1)..(492): unsure at all Xaa locations
  Clone ID: TRIAE-23APR03-C6815_1.p
CSENRRSDGNRGGSRSPPYNESYSDRRSYSGRSDDRNSRHSYGERSPGYDQNDYKKSPRFFEVVDDRSGKTTPVQRFEDRRFSEPRKPETGSPNYQREANGSSPPVVRPVREILGDDAPQLRIGEPPKPNVVRPIDPPKPNGTRTIEPPPQAQRTSTASSIGSSEGISEQTKAATPVSLIDFGKSAPSASGGDWASFDAFGQQQQTPQVGSTVNPLESVLAQLSFSETPSASNTSAFSTSVDPQANGGQLSMIDTSHSSLFGPPVGISGNQVSTGMPVQGSAVHQSAVAASMGGLPSQLPSNSQGTSGIQEATSSHDSKSSGRTVLPVDFFTSLYPSATPAMPGWQRAPQSGMGFGMQYPXNPVYQQNAYPQPAKASNPFDLGNEAAPIQAHMSRPLGASAGATNPTLVGNSSFGVPPQQPQQMYQPSVHQNHYMMQHVSNNMPEQLPNGMLPRQQGGAGSLGVGYDQQAAPRYSQPNTPPSYGAVGGNPFG

SEQ ID NO: 10763 - protein, 218 aa, Triticum aestivum
  unsure (1)..(218): unsure at all Xaa locations
  Clone ID: TRIAE-23APR03-C681618_1.p
GLASTYRTISMILVSPTKRPQHFQCRSSHAAVALHLLLLGVALAMASGTTRAHAVHAPCCXLLQGVNLAPCLATSADAWGAVNISAACCSSLNEALDAGRRCLCSLLLANGVLAGLVATLIPTLPMVLPLPGCYLYAPALAACQGDRSFKLSLASARAWTLTPSSCFPFIWLVSVTLLQTSYDAPPASASVAAGVGDAAGGAVDPAPPQADIAPPPKN

SEQ ID NO: 10764 - protein, 644 aa, Triticum aestivum
  unsure (1)..(644): unsure at all Xaa locations
  Clone ID: TRIAE-23APR03-C6826_1.p
MPLGQRAGDKSDSRYCGVEVLDFPAGDGLPAVLTHSLSSAFDFLLAPLVDPDYRPTPGAVLPVAASDLVLSPSQWSSHIVGKISEWIDLDSEDEQLRLDSELTLKQEIAWATHLSLQACVIPPPKRSTCANYARVVNNILQGLTNMQLWLRIPLEKSESMDEDRGKSETVDSWEWWNSFRLLCEHSSQLYVALDILSSLPSMNSLGRWFGEPVRAAILQTDAFLTNARGYPCLSKRHQTLLTGFFNHSXKVIISGRSNHNVSQVSEGVLSRDENHTEDTPTQHALSPYLDYMAYLYQRMDPLPEQERFEINYRDFLQSPLQPLMDNLEAQTYETFEKDTVKYTQYQRAIAKALVDKVSDDEVSTTRTVLMVVGAGRGPLVRASLQAAEETGRMLKVYAVEKNPNAVITLHSLIKLEGWESMVTIISSDMRCWDAPEKADILVSELLGSFGDNELSPECLDGAQRFLKPDGISIPSSYTSFIQPVTASKLHNDIKAHKDIAHFETAYVVKLHRVARLAPPQEVFSFAHPNFSPKATNQRYTKLQFELPQDTGSCLVHGFAGYFDAVLYKDVHLGIEPNTCTPNMFSWFPIFFPLRKPIYVPSESPIEVHFWRCCGATKVWYEWALVAPSPSPIHNSNGRSYWVGL

SEQ ID NO: 10765 - protein, 416 aa, Triticum aestivum
  unsure (1)..(416): unsure at all Xaa locations
  Clone ID: TRIAE-23APR03-C6828_1.p
MRGLLACATLARRAAASSSTGAAAPTPARRHLAGAAEAAEAELKKTALYDFHVAHGGKMVPFAGWSMPIQYKDTIMDSTLNCRANGSLFDVSHMCGLSLQGRQAIPFLESLVVADVAALKDGTGSLTVFTNDKGGAIDDSVVTKVNDHHVYLVVNAGXGDKDLAHIGAHMEGVPLLASPPQXWYTGEDGFEISVPSENAVDLAKALLEKSEGKVRLTGLGARDSLRLEAGLRXVRYTGEAGFEISVPSAHAVDLAKALLEKSEGKVRLTGLGARDSLRLEAGLCLYGNDMEQHITPVEAGLSWAIGKRRKAEGGFLGAEVILKQLKEGPKIRRVGIFSQGPPPRSHSEIVSGTGENIGEVTSGGFSPCLKKNIAMGYVKNGLHKAGTEFKVVVRGKQYDAVVTKMPFVPTKYYKAP

SEQ ID NO: 10766 - protein, 108 aa, Triticum aestivum
  Clone ID: TRIAE-23APR03-C684744_1.p
THKIYFPKYAQFNLNKSMLLYSRKNTPASTKIQKCKIRVTIQIGDTIECKTCQHRALCPGAVLRNSSQIHDIVMGSNTINPWYLFYRKSIQKYDINVSSDLLYQILSV

SEQ ID NO: 10767 - protein, 607 aa, Triticum aestivum
  Clone ID: TRIAE-23APR03-C6893_1.p
QHFCRSFCPVTERSSPAPPAIGLSPSVQIFPPPAGEATPPHLSLTRASQPQPPRAQRQGRPRPPAPTLTCGPWAGDVVGVTLCLRLPPDKAKPSDANNSSSSSSWTPPKTKPSSLFGVGCAARDQRAAARSQPTATATSGGDGVHLRRGGAALLLLRVPAAAAEAAAHAPLPPPPPRAPFRRRSLSRSSDSPHAPAPPLASRAPAQGGGAAVEKDPIKLWDRYVEWLYQHKQLGLFVDVSRMGFTDDFLLRMEPLMQRAFVAMGELEKGAIANPDEGRMVGHYWLRDPGLAPNSFLRTKIEKTVDHILAFSQGIVPRMAQLGEALDAPLALVLSMGGGAPASRPQFVSEALAPDNPPLKIRFIDNTDPAGIDHQIAQLGEELKSTLVIVISKSGGTPETRNGLLEVQKAFRDAGLDFSKQGVAITQENSLLDNTARIEGWLDRFPMFDWVGGRTSELSAVGLLPAALQGIDVKEMLVGAALMDEETRNTVVKENPAALLALSWYWATDGIGSKDMVVLPYKDSLLLLSRYLQQLVMESLGKEFDLDGNRVNQGLTVYGNKGSTDQHAYIQQPISVTDNFFVTFIEVLRDRPSERAGGIYACLVYVNA

SEQ ID NO: 10768 - protein, 469 aa, Triticum aestivum
  Clone ID: TRIAE-23APR03-C690_30.p
MERDFLGAIGHEQLLQQQQRQRAAAAEDDATRKESAYFGGGGVPPMDWSFAGRAGAAPAVMSFRSAAREEQQGELAYPKQQASRVLTPQRSFGAETHGSVQYAAAARAAYGVQPSQQQHAPNGARVIPMSSPFNPNNPMFRVRSSPNLPNGGAAGSPFKQPPFAMNNAVAASTVGVYKSRDMPKPKTAQLTIFYAGSVNVFNNVSAEKAQELMFLASRGSLPTAPTTVTRSPDATFFTPAKLAAPEASPAKQMLAQIPQRVSPPLPAISKPMSIMSQAACLPKSTSSSNTDSAVPKSSGQLVVPPTSQPSSSTHTATLSSTTAASIMPRAVPQARKASLARFLEKRKAKMLHTRQCLDDNCTIEGSSGRCWAVLDILRLDLTVVHKSSKLYRPHSTAQRKERVTTTAPYPSAKSPMESTDTVGSANDNNSKSSSCTEIAFSSNHEESLRLGRPRNISFSGESPSTKLHI

SEQ ID NO: 10769 - protein, 371 aa, Triticum aestivum
  Clone ID: TRIAE-23APR03-C690_34.p
MDWSFAGRAGAAPAVMSFRSAPREEQQGELAYPKQQASRVLTSQRSFGAESHGSVQYAAAARAAYGGQPPQQQHAPNGARVIPMSSPFNPNNPMFRVQSSPNLPNGVAAGSPFKQPPFAMNNAVAASTVGVYKSRDMPKPKTAQLTIFYAGSVNVFNNVSAEKAQELMFLASRGSLPTAPTTVTRSPDATFFTPAKLAAPEASPAKQMLAHIPQRVSPPLPAISKPMSIMSQAACLPKSTSSSNTDSAVPKSSGQLVVPPTSQTSSSTHPVTLSSTTAASIMPRAVPQARKASLARFLEKRKERVTTTAPYPSAKSPMESSDTVGSANDNNSKSSSCTEIAFSSNHEESLRLGRPRNISFSGESPSTKLHI

SEQ ID NO: 10770 - protein, 293 aa, Triticum aestivum
  unsure (1)..(293): unsure at all Xaa locations
  Clone ID: TRIAE-23APR03-C690_45.p
MAKDEVMETGGGGDFAAKDYTDPPPAXPLIDAAELASWSLYRAVIAEFIATLLFLYITVATVIGYKHQDGTXREHRRRTPRCGGVWRARHRPGAFGGMIFVLVYCTAGISGGHINPAVTFGLFLARKVSLVRALLYMVAQCLGAMCGVGLVKAFQSAYFVRYGGGANTLAAGYSKGTGLAAEIIGTFVLVYTVFSATDPKRSARDSHVPVLAPLPIGFAVFMVHLATIPITGTGINPARSLGAAVIYNKDKAWDDQWIFWVGPMIGAAIAAFYHQYILRAGAIKALGSFRSNA

SEQ ID NO: 10771 - protein, 290 aa, Triticum aestivum
  Clone ID: TRIAE-23APR03-C690_46.p
MAKDEVMETGGGGDFAAKDYTDPPPAPLIDAAELASWSLYRAVIAEFIATLLFLYITVATVIGYKHQTDPAVNSAADAACGGVGVLGIAWAFGGMIFVLVYCTAGISGGHINPAVTFGLFLARKVSLVRALLYMIAQCLGAMCGVGLVKAFRAPTSSGTAAAPTRSPPATPRAPASLRRSSGTFVLVYTVFSATDPKRSARDSHVPVLAPLPIGFAVFMVHLATIPITGTGINPARSLGAAVIYNKDKAWDDQWIFWVGPMIGAAIAAFYHQYILRAGAIKALGSFRSNA

SEQ ID NO: 10772 - protein, 303 aa, Triticum aestivum
  Clone ID: TRIAE-23APR03-C6938_1.p
MEETEAKKPTPASPLFSFSNPSASFGFGFGAAPGPPPPPPPPAVEVLLSEESPVAAGNLEPVVVDDSLSIYKGRVNTSDVLGVKNSDLVPGKYEGGLKLWEGSLDLVKTLNSDIKDDRLLMEGKHVLELGCGHGLPGIFAGLKGAALVHFQDFNAEVLRCLTIPNVKANLFKESSETSRSVGFYAGDWSEIDKLLLRGDAVQDKTTNLHTENEGHRGYNIILMAETVYALDSLPSLYRLIKKCLHYPSGVVYMAGKKHYFGVGGGTRQFLRLVTEDGAMQSDLLAEVTDGSSNVREVWKFSFK

SEQ ID NO: 10773 - protein, 207 aa, Triticum aestivum
  unsure (1)..(207): unsure at all Xaa locations
  Clone ID: TRIAE-23APR03-C6958_1.p
MRSWANRPHSSLLASFLAASWLLVAASPQELHEASGSRILHHTKSHTHEVHCSRERSRAAWKAVDEYLMPFVEKEKYELPSKCRLRPENDMFREQEQHKIHFDCXEWRCGFCKKSFRAEKFIDQHFANRHSNQXNAAAAARNRHLCENLADSCFPITRGHSASRLHEFFLRQFCEGSFLTMGASKTFPLKGGRNQNKPCILPGSLAS

SEQ ID NO: 10774 - protein, 240 aa, Triticum aestivum
  Clone ID: TRIAE-23APR03-C6962_4.p
MKLVVLSALLLLSLVAVSSAEEFDFFYLVQQWPGSFCDTKKGCCFPDTGKPGTDFGIHGLWPNYAKCKTRGELDGALEMVTKRKKKCWPENCNSEPLKLWEIKDLVTELDANWPTLACKSGKSIEFWTHEWEKHGTCSNLDQHGYFKTALGFKARHNLTGILADAGIVPSDSETYFLSSIRDAIKEGTGFTANLECNRGVAGETQLFQVYQCIDRAGKNLIDCPLPMQGNCKDRVQLPAF

SEQ ID NO: 10775 - protein, 267 aa, Triticum aestivum
  Clone ID: TRIAE-23APR03-C69802_1.p
MAVSNNITACVTLMALICAVPVIASGVWFASAQGEECARLARWPVAILGGLILLAALAGFVGAYWNRRRLLAFYLFAMAALIALLIALLVFAFAVTRGSGAYPVLGREYDEYRLDGFSMWLRGYVDPARWEGIRSCLAVSDTCKKLARQAGYVTADQFYQSRLTPLQSGCCKPLSVCGFGYVSPTVWTNPARPASDPDCGLWSNDPAQLCYECESCRAGLLAALRSQWHKANIALVVATVSLVFLYLIGCSAYKNAHAEAIYHRYKW

SEQ ID NO: 10776 - protein, 437 aa, Triticum aestivum
  unsure (1)..(437): unsure at all Xaa locations
  Clone ID: TRIAE-23APR03-C69850_1.p
ATAPSSPPTTPPPCPPVPPQSTTPFLTLQATTAPPSARARAQPVHAGARQARQRQQTGRRARAGGRAAMHHRVARVADRVLCCGRQASGDDLNDERNGSIRWVFSMRGRQSATSRFYYEXKIGEGSLGSVYWGQVWDGSQIAVQKLKNARNXGTEMEFASKGRIVWEEXRHKKPPEFGRVRHKNLLSXRGFXVDGPERFLFFAPMPNLSLFAYLTGNRXTFIAIGAARAIAYLHHHETPPIIHGSIKSTNVLLDSDFQAHVGDFGLMKLISDEIDHDKIIGENQRGYHAPEYVMFGKPTTGCDVYSFGIILLELTSGRKPVEKSGSQKMLGVRNWMLPLAKEGRYDEIADSKLNDKYSESELKRVVLIGLACTHREPDKRPTMLEVVSLLKGESKEMLLRLEKEELFRPDSMASSVGTTPEGSTDCILKNDEGLAGA

SEQ ID NO: 10777 - protein, 363 aa, Triticum aestivum
  Clone ID: TRIAE-23APR03-C69860_1.p
MADDDQQWKIPPNVQELAAAGPEEPPSRYVVRDHDRPALAGAGSDVTDPIPVVDLGRLSSGDADEAAKLRSALQTWGLFLAVGHGIEPALLGEMMAVTREFFNLPLEEKQRYTNLVGDKKEYRIEGYGGDMVLSETQVLDWCDRFYLVVDPESRRLHDLWPTRPPSFRDVLHRYSARCRELADAVLREAAGAAGLPDQGRLADMLDEKAVTYVRLNCYPPCPRPDRVLGFRPHSDGGALTVLLAETAGLQVRRDDDAGGGGWHDVPVVPGALVVNLGDTVEVVSNGVLRSPVHRVVAGAERGRVSMAMFYTVDPEREVEPAPELVSEERPRRYEKTKKSGDYVRKLLESLARGERAIDKVKVV

SEQ ID NO: 10778 - protein, 390 aa, Triticum aestivum
  Clone ID: TRIAE-23APR03-C6988_1.p
MSVLPEPTLAGVARELATLAAPLWLAALVGLLIGWAWRPRWAAAVVDVAVAGQHHHEPVANHLAVVPRAKPASVEPVTEEEELAVSTPDLMHLRRVVEEKDGGPAWTHIMDRTLPTFRYQAWKREPQNGTPQYRSSTIFEDASPDVVRDFFWDDDFRISNTWDDMLLEHDTLEECTKTGTMVVRWVRKFPFFCSDREYVIGRRIWASGKTYYCVTKSVPRPSVPRCSKPRRVDLYYSSWCIRPVESRNGDGAMTACEVLLFHHEDMGIPWSIAKLGVQQGMWGCVKRIEPGLRAYQTARASGEPISKCAAMAHANTKFVADELTASENNTEAGSTSNNAQAEKPKHWTGNLPKVFVIGSVVALACTFDKGLLTKALVFGTARRFAGPGRR

SEQ ID NO: 10779 - protein, 270 aa, Triticum aestivum
  Clone ID: TRIAE-23APR03-C69937_1.p
MLLRSSSTPFLRSFLTSSSSPTPPSSLQLRRAFSDGHLPSLNPSSSGDNDSNRTTGLHTELSFSVYNTFSKAKLEPHQEQEMEEEQEQAPQPELPELPLFLARGMGIDRLASGLFTAGMGSEAALARMASGVDQKAVLALDAQYKEMVDEQPGNALFLRNYAQFLHEVKCDSRRAEEYYSRAMLADPTDGEIMSQYAKLVWAVHRDHERSLTYFQKSVQAAPRDSHVLAAYASFLWEQDEDEDDDGGLGGGEQGSPGRATQPRQLASTAV

SEQ ID NO: 10780 - protein, 394 aa, Triticum aestivum
  unsure (1)..(394): unsure at all Xaa locations
  Clone ID: TRIAE-23APR03-C69_1.p
MGLAENHLSLDLVREWMEEHAGPAMTPARGDEERDLTISGLATYQPYDGILALKMALAGFMRQIMHESVSFDPSQMVITSGATPAMEILSSCIADPGNAFLVPSPYYPGWDRDIKWRTGIELIPVPCRSTDNFNISITALEIAYKQSLWWWKGSRRVTNGNKSNRXNTYITPLTLRDLLEFATEKNIHLISEEVFAGSTLGSGEFVSVAELVNELEDFDRGRLETIMPLVVEQRTGIMFILVNVLSVPGXIQARDKIARFSSVSTPNQRLLVAMLSDQKFISNYLKVNRERLRKAYNLLVDALKQVGIECFKSSGGFYCWADMSKFIRSYSEKGERRLWDRLLEEAKVNVTPGSSCHCIEPGWFRCCFTTLRERDIPVVVERLRRVTASHKSNR

SEQ ID NO: 10781 - protein, 400 aa, Triticum aestivum
  Clone ID: TRIAE-23APR03-C70041_1.p
MAGGDEEATTALLPPPAGSAEAERPPPPPADRLGVGYLIFFTLGAGFLLPWNAYITAVDYFSYLYPGAPVDRVFSVSYMLSCLLPLLLIVLVFPKSSAPARINTGLTLFTLALLVVPVMDAVYVKGSLRLSGAFDVTVAFAGELPERYMQAVVAGTAASGVLVSALRVITKASFPRDPNGLRQSAILYFMVGMVVMIICIVCYNVARRLPVVVYYKNIKQRAQKAEVGGGMTGPAWRSTLWSIVGTVKWYGIGVVLIYAVTLSIFPGFITEDVHSEALKDWYPIMLISAYNVFDLIGKCLPAIYLLQNSNVAVAGSFARLLFYPLFYGCLHGPSYFRTEIPVTVLTCLLGLTNGYLTSVLMILAPKAVPIHHSETAGIVIVLFLVVGLVLGSFVAWFWVI

SEQ ID NO: 10782 - protein, 293 aa, Triticum aestivum
  unsure (1)..(293): unsure at all Xaa locations
  Clone ID: TRIAE-23APR03-C70072_1.p
MQGGGVSGFHNAPVTRAIVLASGLLSVVFSVNRRARALGLSYQDIIKNFRVWRIFASVFAFQSTPELMFGLYLLYYFRVFERQMGSNKYSVFTFSPFXSLFSIAVSLPLEILSLVLLHDTNYITALASGPYGLIFASRLPLLLAIPFSSRFRLCRVILSPSSPAAPAGLLLPVSSWKRSLIPGICALSARSLCRPPVFGSPRWRLPLRVASFSACSLVPPSASSSRPSCTLVGRPSXQTRPSARFPPAAEPPESSIAMLVSMGFDSNVARQALVRARNDINVATNILLEAQSH

SEQ ID NO: 10783 - protein, 324 aa, Triticum aestivum
  Clone ID: TRIAE-23APR03-C70141_1.p
MEASKGSDGSSGASASNDDSTVEEEGAGRESHEDACRGNSLSSSSVRPYVRSKNPRLRWTPELHHCFVRAIHRLGGQDRATPKLVLQLMNVRGLSIGHVKSHLQMYRSKKIDDSGQVIGHLPLPHAFHHRQSGAGTMLSRFGAAAWPPWRSFHEPYWAHGRPFLGSKTYNSLEAEAEAAFLRSRAQHVARAASSNPGLMMQSGCPSRNDHHTMNHQPKRLLQLTVRNDDDTHVLLDLDLGLSLGLPVPMREAKRRRSGCGWVKEGPDEKGADEEQVDETSTATMLSLSLFSPRDAPRKMSSTSASDHAVDEHATRRASTLDLTI

SEQ ID NO: 10784 - protein, 113 aa, Triticum aestivum
  Clone ID: TRIAE-23APR03-C70340_1.p
TRDGRLGHRLRGRRVRRPGSHHRLRDGRVLAAHGAHIIMAVRNLAAAEAVRQVVLAETPVASLNLIELDLSPLTSIRNFAANFADRGLPLNILMTIQHTPALSEREGFPLMDT

SEQ ID NO: 10785 - protein, 544 aa, Triticum aestivum
  unsure (1)..(544): unsure at all Xaa locations
  Clone ID: TRIAE-23APR03-C70360_1.p
NSRRARRTHGHRHCPSLLSSSPTPRRARPSDPHGVPACGAPGGRRRRGRCRCRGTSAGWPRRPRSPPRPASSGRAAPTRPQVFLVYPLIGNLHQLKXKKPHNTXAKWSDIYGLKYTIKXGLPSLAVFNSSAVANKAMVEKYSSISTRKLPQAXTRSTCISRREGGSEWHFCCSLKRKIGSFAVGNDVCKXRIGRALQNFVDHMLTSFDTLVTDDPHSPLNFREVFKDELFRLSLIQSLGEDVGSVYVKEFGREISKDEIYQITVVDMMMCAIDVDWRDFFPYLSWIPNKGFETRVRTAESRRTAVMQALIHQQKKRIANGEARASYLDFLLAEKALTDEQLMMLVWEAVIEAADTTLVTTEWAMYELAKNPEKQDRLYQEIREVCGDETVTEDHVPRLPYLSAVFHETLRFHSPVPLVPPRFVHETTKLAGYDVPAGTEIVINLFGCNMNKKDWEEPEDWRPERFMDGRFEAADMYKTMAFGAGRRSCAGSLQATTISCAAIARFVQDFAWRLKEGDEDKVDTVQLTSYKLHPLYVYLSPRGRK

SEQ ID NO: 10786 - protein, 579 aa, Triticum aestivum
  Clone ID: TRIAE-23APR03-C703_1.p
SAPPQLSPRPRADRPAGGEIRKWCRHLAEAGERESDRERFSPVSTPPPLHRDDLSSPASPHRGGGPPLKKGPWTSAEDAILVDYVKKHGEGNWNAVQKNTGLFRCGKSCRLRWANHLRPNLKKGAFTPEEERLIIQLHSKMGNKWARMAAHLPGRTDNEIKNYWNTRIKRCQRAGLPIYPASVCNQSSNEDQQGSSDFNCGENLSSDLLNGNGLYLPDFTCDNFIANSEALSYAAQLSAVSISSLLGQSFASKNCGFMGQVNQAGMLKQPDPLLPGLSDTINGALSSVDQFSNDSENLKKALGFDYLHEAVCLVRALHPKTAASWGSHAFLNGTFSTSRTINGPLKMELPSLQDTESDPNSWLKYTVAPAMQPTELVDPYLQSPTATPSVKSECVSPRNSGLLEELLHEAQGLKSGKNQQLSVRSSSSSVSTPCDTTVVSPEFDICQDYWEEPLNEYAPFSGNSLTGSTAPVSAAPPDVFQLSKISPAQSPSLGSGEQAMEPAYEPGAGDTSSHPENFRPDALFSGNTTDSSVFNNAIAMLLSNDMNTDCKPVFGDGIVFDTSSWSNMPHACQMSEEFK

SEQ ID NO: 10787 - protein, 321 aa, Triticum aestivum
  unsure (1)..(321): unsure at all Xaa locations
  Clone ID: TRIAE-23APR03-C7040_5.p
MESKHTDQANVKAKLSTMHSKVICCKLYISESQNAAVVDAISRIGQKDPEVVLLNKFEDEYYNRVRYTLVSYITNESSTGGAVFSPIRKVLLAMIEAAFSAINLEVHCGTHPRIGVVDDISFHPLNQADTIEDAAQLAKLVASDIGNGLQVPVFLYAAAHPTSKSVSAVRRELGYFRPNHKGVQWAGPVLPDTLPMKPDVGPVHVPRERGATMVGAQPLVESYNVPIFCKDVPTVRRITRRVTXRSGGLPSVQALAXXHGDNCTEIACXLLDPDHVGADRVQWLVEQIAEEQGLEVEKGYFTDLSKHMMLERYSEMVSAAD

SEQ ID NO: 10788 - protein, 337 aa, Triticum aestivum
  Clone ID: TRIAE-23APR03-C7047_1.p
MSTPSDPAASAQPPSTAATSSSGLTFKLHPLVIVNVSDHYTRVKAQASFPAEAPSPGKAQASCSAEGSPPPAEPPRVFGCVIGVQRGRTVEIFNSFELVLDPVTGTLERAFLEKKLELYKKVFPEFYVLGWYSTGSDVQDTDILIHKALMDINESPVYLLLNPAINHSQKDLPVTIYESELHVIDGGPQLIFVKSNYTIETVEAERISVDHVAHLKPSDGGSAATQLAAHLTGIHSAIKMLNSRVRVIQQYLGAMQKGDIPLDNSLLRQVSSLVRRLPAMESEKFQDDFLTEYNDTLLMTYLAMFTNCSSTMNELVEKFNTTYERSPARRGGRGAFM

SEQ ID NO: 10789 - protein, 160 aa, Triticum aestivum
  Clone ID: TRIAE-23APR03-C70707_2.p
SRLFGHRNIGGHGISGGQGALLGAAIAAIHLAALSNSRLVHVHRGGRQWVLQLQVLALHLHVLGSNLQIHLALHVHLLPNALDPTLRKETEERSRPNGLDEAAADAHRINHRRSTAKAEIFIFDFRFLGRVINQSAGGRTGRERGFAGVMVVIIVCGRRW

SEQ ID NO: 10790 - protein, 360 aa, Triticum aestivum
  Clone ID: TRIAE-23APR03-C70717_1.p
MKSQGSAGHAIAEDIGSKKIVLVKQKKKIKHAKVTSCCTKAHNLVTLNEDEGTPKLKKKKSKKQLKESKSPVEVQSPLDSNDAGTLKLKKKKRKVKEGKSSVEPNDADDILHENLDEETLNADVNQLPAESEVMDIGEPEKAKKRKKNKTADVKQVAEESEVMDIGEPEKAKKRKKNKTKKVKQSGEVNRTDMQVSVREDNLEEHEVDTADVDEIASVDEDCSRGIKKWILEYRQKRPGLKVLQQNIDVFITAHEEQQEREKKEREAAAAEDGWTVVMHHKGRKKTTDVETGTAVGSVSLAAMQEKMAQKKPKEVGRNFYRHQKREAQMSELAMLQSKFEQDKKRIQQLRAQRKFKPYGF

SEQ ID NO: 10791 - protein, 180 aa, Triticum aestivum
  unsure (1)..(180): unsure at all Xaa locations
  Clone ID: TRIAE-23APR03-C7075_1.p
RQERGGARAPGRPSPPSLLRPPSVQIPLRPDGRSDKMMGGFVSRILLLVFGYAYPAYECYKTVELNKPEIEQLIFWCQYWILVALMTVMERFGDLTISWLPFYSEAKLXFFIYLWYPRTKGTTYIYGTFFKPYISQHENEIDRNLLELRARASDVVVVYVQKVAAVGQNTFFDVLKYVAL

SEQ ID NO: 10792 - protein, 301 aa, Triticum aestivum
  Clone ID: TRIAE-23APR03-C70835_1.p
TGAREATTSLPPKAREAVGSRLHLPLRRWLEGGAPVLCRLVDRCRGRFPWGAAMVVEAASRRAVYAAARSPLRRSSLWWSRRASGRVFSLVKSDRRDLSAGAGSARRRRRPSRCFLSSRSASVLAVFPPAQLEGLGGCTGANRPAVAASFGSVDGDLQGAVCLEQGSWKREGRSGVLLRLRGMEPADLQSVEHGDAPPPTCPKVSVPSFYGGSLNRLTKLLQRWCFGGFGFVGSLSSHPPAVLWRRRRMETRVEDVVCKGLQGLGCTFVFWGVFCAKFQGHMCFWVLLVCAACVRCNCFEL

SEQ ID NO: 10793 - protein, 257 aa, Triticum aestivum
  unsure (1)..(257): unsure at all Xaa locations
  Clone ID: TRIAE-23APR03-C71100_1.p
MAHFQGQQHGHPATRVDEYGNPVPAGHGVTGTEGLGHFPGQAQQHGHNTTRLDEYGNPVTAGHGVGLGSTGTGVHGGYGSAGTGHPXTLRGHGRQVGYGATGTGTHDAGGVWRLRGIAPRHDTTGTGLHDAGGXGHAEYTTAAGRDGPGYTGTTGTHGPGYTGSTGTGGAHGATEGTHEKKGVMEKIKQKLPGGHKDTQPHTTATGGYGPGTTGTTGTGGYGTGTTGTAGTHGATEGTHEKKGMMEKIKEKLPGGHH

SEQ ID NO: 10794 - protein, 325 aa, Triticum aestivum
  Clone ID: TRIAE-23APR03-C71169_1.p
ALTSRNPFPRPSPPTPPPPPPGSSPPPPTRAAAPSTGRGARPLGPRPVTSASGQGPGTGHPGTARSGCASSGGRGEEHRVGGCRGWGPRGRGGGCGERPGGRWSRASGWTCTPSPPPPSSGPWTPSGGSPSRRGSACPRAPPPPAPPPAAPPPRHPPHDPDPARPLLPLAVAKILRALALQETPGLLILGKQAIDDDCNQTGQMLAALLNWPQGTFASKVIIDKDKQKATVEREVDGGTETICLDLPAVITTDLRLNQPRYATLPNIMKAKSKVIKKVTPADLNVDVRSDMEVLRVDEPPKRKAGVILSSVDELLDKLKHEARVL

SEQ ID NO: 10795 - protein, 247 aa, Triticum aestivum
  Clone ID: TRIAE-23APR03-C71425_1.p
MASNQDKASYRAGEAKAHTEEKAGQVTGATKDKACEAKDRACDATGKGQGAVGGPEAEGRRGRAGDVRDGPGRKGPGGRGPQPAAKPGQVTGAAKDEACDAKDRASGAAGQATGKGQGAVEATKQKAGEAGQKTSETAQAGKDRAAEGKDRTGSYLGHATEGTKQKASEATGYTQDRASDAAQYTKDSAVAGKDKTGSVLSQAGEQVKNAVVGAKDAVASTLGMGGDNTSSATKDASTTETITKSRH

SEQ ID NO: 10796 - protein, 362 aa, Triticum aestivum
  unsure (1)..(362): unsure at all Xaa locations
  Clone ID: TRIAE-23APR03-C71605_1.p
MAARLVVLLLALVHAGVSAEDVIRQVTDGGHGPGGPVLLAEAQVAPLVRRPGKQYAGAERYARQRGLCAGHLGRPPAHQALDPGPRHGDTPFAHVTRERSGGRRTRPAGRARRPARRAXMPAAAPATEEEVAALPASFDWRDKGAVTDVKMQGVCGSCWAFSTTGVVEGANFVATGKLLNLSEQQLVDCDHTCDAVAKTECNSGCSGGLMTNAYKYLMSSGGLMEQAAYPYTGAQGTCRFDRSKVAVRVANFTAVPLDEDQMRAALVRGGPLAVGLNAAFMQTYVGGVSCPLICPRALVNHGVLLVGYGARGFSALRLGYRPYWLIKNSWGQQWGEGGYYKLCRGRNVCGVDSMVSAVAVAP

SEQ ID NO: 10797 - protein, 303 aa, Triticum aestivum
  unsure (1)..(303): unsure at all Xaa locations
  Clone ID: TRIAE-23APR03-C71640_1.p
LLLRCTSLSLLEVLLCCIAKCSLAPYWLILRTMWKFLRAAAMFYISIFTNIQLLCHANVDTIIVFXSLLVPIFGTIGVDTLPSTNLCPSFXTWLSLSTILGGSVIYVFTDNQFTLTAYSWAIAYLASMSIDFVYIKHVVMTIGLNTWGLVLYNNLEALLLLPLELLIMGGFFQTKVDSSKMTTNWLSFDVVLPVALSCLFGLSISFFGFSCRRAISATGFTVLGIVNKLLTVVINLLIWDKHASLVGTIGLLICMSGGVLYQQSATKPKVPKIEPKEEDDEEGQNLLQIQPGHESNPSQKHSS

SEQ ID NO: 10798 - protein, 244 aa, Triticum aestivum
  unsure (1)..(244): unsure at all Xaa locations
  Clone ID: TRIAE-23APR03-C71733_1.p
MASVQLCGAAAVGAAGFAGKGAAAVEPARVAAPAARRGALRGLVARAATVVAPKYTTVKPLADRVLLKTKTAEQKTTGGXAQSKPQSGEVVAVGEGRTIGDSKVEVGIKVGAQVVYSKYAGMEVELNDSNHLILKEDDIIGILETEDVKDMKPLSDRVLIKVAVAEDKTAGGLLLTNSVQEKPSVGTVVAVGPGHLDEEGKRIPLPVSTGNSVLYSKYAGAEFKGADGTNYIVLRVSDLMAILS

SEQ ID NO: 10799 - protein, 411 aa, Triticum aestivum
  unsure (1)..(411): unsure at all Xaa locations
  Clone ID: TRIAE-23APR03-C71827_1.p
MNGGGGRGARTRSRLRPQYDVLRAGGGAGVLVACLQSMPAAAGGAGGGRPRGSGLPVAPRAPAPDAGAATARSPVLRCRFAAPNPHTGGMAPASGLAVARPGGRAHHRRPPGRLSDGRLLIDFIGESLGTPHLRPXDRALGSHLSNGANFAIGGSTATPGGSPFSLDVQLHQFLYFRTRSFELLNKGEKTPVEREGFRNAIYAIDIGHNDLSAYLHLPYDQVLAKIPAIVGHIKFGMETLYAHGARKFWIHGTGALGCLPQKLSIPRDDDSDLDANGCLNKYNNVAKAFNEKLAETCNQLRQRMADAAIVFTDLYPIKYDLVANHSKYGVERPLMACCGNGGPPHNYNHFKMCMSGEMQLCDMDAKFISWDGIHLTEFANAIVASKLLTGDYSKPRVRIASLVNSTAPHDG

SEQ ID NO: 10800 - protein, 253 aa, Triticum aestivum
  Clone ID: TRIAE-23APR03-C71854_1.p
MATAEQKGKRPRMEAEEGNSIDDALLLSIEKLQEIQDEIERVNEEASDKVLEVEQKYNEVRRPVYTRRNEIIKEIPDFWLTAFLSHPMLGELLTEDDQKIFKHLVSIDVDEFQDIKSGYSITLAFSSNPYFEDTKLTKTCSFSDDGKITVKATTINWKNGMDIANGKAYMENGEKRLLIDESFFTWFNDAKNKSFSDGVMDEVADVIKEELWPNPLKYFNNEAEDEFEDDKDEEGFDEDDDDEDEEEEEDDEE

SEQ ID NO: 10801 - protein, 157 aa, Triticum aestivum
  Clone ID: TRIAE-23APR03-C71899_1.p
MLRPCALPPYEVLGAVLSHVDPLTEQQIVAVYGLQQSAVQTEEALSQGLDTLYQALSDTVVSDALTCCSTPNVSNYMGQMGLAVHKLTTLEGFVRQAEKLRQQMLHRLHQVLTARQMARSLLAVSDYFHRLRVLSSFWVNRNRMAPQDQQLEAGPHT

SEQ ID NO: 10802 - protein, 477 aa, Triticum aestivum
  Clone ID: TRIAE-23APR03-C718_3.p
KSDSNPQSTPHSTPECSPLLILLMLLAAGAAGAESATPSLHIGVNYGANADNLPSPTSVATFLATKTTIDRVKLFDANPTFISAFAGTPISLAVSLPNSALPALADKATGLDAARSWIRANLSPYVPATNVTLLLAGNEILLSTDTNLILSLLPAMRRLAQALKAEGLTGVRVTTPHYLGILAPSDGIPSNASFRAGYNTKLFPAMLQFHRDTGSPFMVNPYPYFSYRPETLNYALFRPNSGIYDPATKLNYTSMLDAQMDAIYTAMKKLGYGDVDIAVGEAGWPTQAEPGQIGVGVQEARDFNEGMIRVCSSGKGTPLMPNRTFETYLFSLFDENQKPGPIAERHFGLFNPDFTPVYDLGLLRDGASVAPTPSPNPSPNPSPKPAPSGGGKWCVAKDGANGTDLQNNINYACGFVDCKPIQSGGACFSPNSLQAHASYVMNAYYQANGHTDLACDFKGTGIVTSSDPSYGGCKYVS

SEQ ID NO: 10803 - protein, 385 aa, Triticum aestivum
  Clone ID: TRIAE-23APR03-C71942_1.p
MAAARPHHRAPPGRVPTRCVAALCAACFLLGVCVVNRYWAVPEPPDCPSKANSGRSRAVLSQAQTREVIIALDRTISDIEMRLAAARAAQMRNQGVSPSDSAADQGNMRPRLLFVMGIMTTFDNRRRRDSIRKTWMPQGERLRMLEKDKGIVTRFVIGRSANPGPDSEVERAMDAEEKEYNDILRLNHVEGQDGLPLKIQMFLSSALSTWDADFYVKVDDDVHVNIGITRSILARHRSKPRVYIGCMKSGPVIANNESKYYEPDHWKFGTAGNNYFRHATRQLYAITRDLATYISANKHILHKYTNEDVSFGSWLIGLDVEHVDERSLCCGIPPDCEWKAQAGNPCGASFDWNCSGVCNPAERMEEVHRRCWEHREAALPQAQES

SEQ ID NO: 10804 - protein, 317 aa, Triticum aestivum
  unsure (1)..(317): unsure at all Xaa locations
  Clone ID: TRIAE-23APR03-C71942_2.p
KSHIGKSSLQADCTFSASGMSCWADLLRGVTFCNPGGLFTTGLHNKEHXLKFGFFPLPQELVEKSKDHRRSNSRVARPEAYRTMGTTLQTWWRKFPPFYNVRFVSIDGFLEPIDLKDRAVTVWWLCQKGLEWKLEYKISLEALWEFNGFGDLPRNLTPMYPLLSPNDHEMVYFALAEWRENQSNWLFIPTCARYLLAINPQHKTVVASVCLADYFGNPNIPPDIISSDFQRHIHTVSLDLHIMLMETMKQMSLTSLDPAEYDEEEAKKLMKEEPWTWQEKLKEQDRPLPLPLPARYYRQPSLARLIGNADTILKLSD

SEQ ID NO: 10805 - protein, 417 aa, Triticum aestivum
  Clone ID: TRIAE-23APR03-C71948_1.p
MRRAAAATATRTRIGMAAEEVRQASAAATAAEAASASVPAPAGSRWARVWPSALRWIPTSTERIIAAEKRLLSILKTGYVQEQVNIGSAPPGSKVKWFRSSSDEPRFINTVTFDSKENAPTLVMVHGYGASRGLFLTNFDALALPLRVIAIAQLGCGASGRPDFDCRSTEETEAWFIDSFEEWRKAKNLSNFILLGHSFGGYVAAKYALQHPEHVQHLILVGSAGFSSETDHSSEWLTKFRATWKGMLVNHLWESNFTPQRIVRGLGPWGPDLVRRYTTARFGSHSTGELLTENESSLLTDYIYHTLAAKASGELCLKHIFSLGAFARKPLLHSASDWKVPTTFIYGHDDWMNYQGAQQARKDMKVPCEIIRVPQGGHFVFIDNPVGFHSAIFYACRKFLSGDAGEGLSLPDGLISA

SEQ ID NO: 10806 - protein, 249 aa, Triticum aestivum
  unsure (1)..(249): unsure at all Xaa locations
  Clone ID: TRIAE-23APR03-C71_33.p
TDLLSPSLSLSSAAIRSEMAMRAWRRSAAARAPAHLCLWLALVAATLVLAQVLIHLGKKSNLSEVTHKVYFDIEIDGKPAGRVVMGLFGKAVPKTAENFRALCTGEKGMGNSGKPLHYKGSSFHRIIPSFMIQGGDFTLGDGRGGESIYGTKFGDENFKLKHTGPGYLSMANAGRDTNGSQFFITTVTTSWLDGKHVVFGKVLSGMDVVYKVEAEGKQNGTPKTNFIADXGEVRCMTETVSGGNYVISL

SEQ ID NO: 10807 - protein, 246 aa, Triticum aestivum
  Clone ID: TRIAE-23APR03-C71_37.p
MADYHFVYKDVEGATTQWDDIQRKLGNLPEKPAPFKPPPFAPRADADEQPRSKEWLDARDPDELEELEDDLDDDRFLEQYRRMRLAEFKEAAKTARFGTIQPITGSDFVREVSQAPPDVWVVVFLYKDAIPECGLLETCLEELATKYAETKFVKIISTDCIPNYPDRNVPTILVYNNSAVKGTYVGLQKFGGKKCTPESVALALCHSDPVLNDGQGGNNVMEGVRRKFIEKVVSQLETREDEDDSD

SEQ ID NO: 10808 - protein, 420 aa, Triticum aestivum
  unsure (1)..(420): unsure at all Xaa locations
  Clone ID: TRIAE-23APR03-C71_39.p
MAMASPFSPASAAAASPALFSVSTSRPLSLTTAATAAVSARAPCRGSRGFRRGRFAVCNVAAPSAAVQETKPAAAAKESQRPVYPFPAIVGQDEMKLCLLLNVIDPKIGGVMIMGDRGTGKSTTVRSLVDLLPDISVVVGXPFNXDPYDPEVMGPEVRDRLLKGEDLPVTTTKITMVDLPLGATEDRVCGTIDIEKALTEGVKAFEPGLLAKANRGILYVDEVNLLDDHLVDVLLDSAASGWNTVEREGISISHPARFILIGSGNPEEGELRPQLLDRFGMHAQVGTVRDAELRVKIVEERARFDKDPKTFRQSYLEEQGKLQDQITSARSNLGSVQLDHDLRVKISQVCSELNVDGLRGDIVTNRAAKALAALKGRDIVTVEDIATVIPNCLRHRLRKDPLESIDSGLLVVEKFYEVFG

SEQ ID NO: 10809 - protein, 421 aa, Triticum aestivum
  Clone ID: TRIAE-23APR03-C71_43.p
MAMASPFSQASAAAASPALPFSVSTSRPLSLTTAATAAVSARAPCRGSRGFRRGRFAVCNVAAPSAAELETKPAAAAKESQRPVYPFPAIVGQDEMKLCLLLNVIDPKIGGVMIMGDRGTGKSTTVRSLVDLLPDISVVVGDPFNSDPFDPEVMGPEVRDRLLKGEDLPVTTTKITMVDLPLGATEDRVCGTIDIEKALTEGVKAFEPGLLAKANRGILYVDEVNLLDDHLVDVLLDSAASGWNTVEREGISISHPARFILIGSGNPEEGELRPQLLDRFGMHAQVGTVRDAELRVKIVEERARFDKDPKTFRQSYLEEQGKLQDQITPARSNLGSVQLDHDLRVKISQVCSELNVDGLRGDIVTNRAAKALAALKGRDIVTVEDIATVIPNCLRHRLRKDPLESIDSGLLVVEKFYEVFG

SEQ ID NO: 10810 - protein, 617 aa, Triticum aestivum
  unsure (1)..(617): unsure at all Xaa locations
  Clone ID: TRIAE-23APR03-C7216_1.p
MWRHAAARRSAQIRRLLSTSAPSAGAGSVLRGPSIVHKRGTDILHAPWYNKDTAFPLTERDRLSLRGFPPTQRVRLGLQGVLLMRFNKSEEHYQRLVTGSPLLVPKPQSPPLLVVSIATWEAPTWMHDSKEAWHSRIRSTTCLGCGGTMFTANSSTANNVRRSTPGTDVSVTYNXSDQWNTWLFRFSCSTWEYFSRLXLPGILALLLTHFVYVAAAGINPQIVVPIMLDVGTNHEELLEDKLYLGLRQPRLEGEEYLAVVDEFMEAVHARWPKAIVQFEDFQMKWAFETLQRYRSRFCMFNDDVQGTAGVALAGLLGAVRAQGRPLADFTKQKIVVVGAGSAGIGVLNMAKHAMLRMPGTHKIGELGEGHNQFWVLDKDGLITKSRKDLDPAVARFARGYGPEEVEDLHEGASLVEVVKKVKPHVLLGLSGVGGIFNEEVLKAMKESDSPCPAIFAMSNPTTKAECTPEDVFKHVGENAVFASGSPFSNVTLSNGRKGYANQANNMYLFPGIGLGALLSGARHISDGMLHAAAECLASYITDDAIRKGILFPSISSIRHITARVGAAVARAAVDEDLAEGCSDLDPRDLRSMSESDTVDYVARKMWYPVYSPLVNDK

SEQ ID NO: 10811 - protein, 210 aa, Triticum aestivum
  Clone ID: TRIAE-23APR03-C7229_1.p
MDGVIGQILEKQVLSAAKAVEDKLDEQIAALERLDPDDIEALRERRMLQMRRAAERRAKWRALGHGEYTEVPEKEFFSTAKASERMVCHFYRDNWPCKVMDKHMSILAKQHVETRFIKVHAEKAPFLTEKLRVVVLPTLALVKNAKVEDYVVGFDELGGKDDFSTEDLEERIAKAQVIFLDGEGPANPSKQAAASKRSVRQSDTGNSDSD

SEQ ID NO: 10812 - protein, 463 aa, Triticum aestivum
  unsure (1)..(463): unsure at all Xaa locations
  Clone ID: TRIAE-23APR03-C7233_1.p
MSAEHGAAAADGAGAEPPPPAPMPGLVASADAAGQRSLPTPFLTKTYQLVEDPAVDDVISWGEDGSTFVVWRPAEFARDLLPKYFKHNNFSSFVRQLNTYGFRKVDPEQWEFANEEFLRDQRHRLKNIHRRKPIFSHSSHTQGAGPLADSERRDYEEEIERLKCDNASLNLQLERKKTDMESKMKALEDKLFAIEDQQKNLISYVREIVNAPGFLSSFVEQSDHHGKKRRLPKPISFHDDACTQGNQIMHCDLVNSPAHELFRSSFDKMESSLNSLENFFKEASEAFGNDVSSDGDVPGHSSAVVLTELHSTGESDPHAQSPPSMMHTCSAGVGDSHSSRDIAESASCPESPLLPQAHSRADSRAKVSEIDVNLEPAVTENGPSRDQQPTQDLPADANDGFWQQFXTEQPGLDPMHTRRPNAERRDREANQTTAGDRGSFWLDKSSIEQMTKKLGHLTSAEKT

SEQ ID NO: 10813 - protein, 282 aa, Triticum aestivum
  unsure (1)..(282): unsure at all Xaa locations
  Clone ID: TRIAE-23APR03-C7270_1.p
MADGVVSSAVHPNGHSPEFVFRQYRGRRAGIVKALTEDVEEFYEQXDPDEKALCLFGLPDGTWEVSQLPEEIPVQLPEPVCGINFARDVTPKKXWLSMIAIHSDAWLMSIAFYHAGRVSFDGDMRWICTPAGNRIWCSIFELXPFQNKTNTPNGGWVLGSRSLPPMQFTSNCKPGDTGPCRCPRKITTPISTAGRXEDRPMLKEEDGGKEGGGGEDQAITKCAGCDEIYSANDGHLWIGCDHCQRWFHGKCVGVTAEMANGIEDYMCPGCSYKATTKASDSI

SEQ ID NO: 10814 - protein, 410 aa, Triticum aestivum
  unsure (1)..(410): unsure at all Xaa locations
  Clone ID: TRIAE-23APR03-C7277_1.p
TSLHVPSSPGLVDHQGSRVIQLHFGLESRPNPHPILGVDPRIKRKNDGGQGLKFRKDHIEVIXSMKCRRVYGWEVVDYIWNHSFTPWVLINSEKHHLLIAKPILNSSQHKLKTAELMFGKYKVLGLCLTKNAVCTSFASGRATSLVVDSGGGSNLVYAVQPGSFLENSGATSLXGCEFLTDCMMKSLXGIAMCDXSRYSCITKEVSPFSYRVINLDFPKTTREXRLYDMRAIASDIKETVCRVPDTPFDEVAYANVPTTSYELPDGQTIEVGAERFKIPDILFNPFLSQTIPGIDGFGDSTSIRGLPRMVLESVNRCDVDIRKELLSSILLSGGSSSILQLKDRLEKEVLEESPQNARVKVLASGNSTERRFSVWIGGSILASLGSFQQMWFSKAEYEEHGVSYIQRKCP

SEQ ID NO: 10815 - protein, 167 aa, Triticum aestivum
  Clone ID: TRIAE-23APR03-C730_1062.p
MAETEYRCFVGGLAWATDDNNLQQAFSQYGEILDAKIINDRETGRSRGFGFVTFGSEESMRQAIEEMNGKELDGRNITVNEAQSRRSGGGGGGGGGYGGQRGGGGGYGGGGGYGGGGGGYGGQGGGGYGGQRGGGGGYGGGGGYGGGGGYGGQRGGGGGDSGGQWRN

SEQ ID NO: 10816 - protein, 238 aa, Triticum aestivum
  unsure (1)..(238): unsure at all Xaa locations
  Clone ID: TRIAE-23APR03-C730_1224.p
MALLPLVLAVLIVSCAAQQPPVQPPPTPNAPPAGNPPPAPNAPPAGNPPPAPTVPPAGNPPPAPSAPPAPTTPPQAPQAPATPPPAPQAPATPPPAPXTPPATPPPAPTTPPPAPPTQPPPAPTTPPPSPPATPPPAPATPPPSPPMSPPPATPPPMATPPAMAPXPPRPSPRRHRPRATPSMSPTSPKTTSPTSSPTSSPTLAPAGTPVTDSSASSARAAGVAALVALASAGLAVFL

SEQ ID NO: 10817 - protein, 157 aa, Triticum aestivum
  unsure (1)..(157): unsure at all Xaa locations
  Clone ID: TRIAE-23APR03-C730_1266.p
MLAIGVNHKWDAFPRKGQHPSTGQPTYQIIKVMNANHMSVMKTSLTVIPMCPRERFPLYKSLXSGLSFATKRIGPSCCTLFTFITCYPLQITLSQNYLLPIISVLAESTLLKTACHFLLLLVGFDTLTYRKGYDRSPTLVGHQKPPSVVLCLAFCGV

SEQ ID NO: 10818 - protein, 343 aa, Triticum aestivum
  unsure (1)..(343): unsure at all Xaa locations
  Clone ID: TRIAE-23APR03-C730_1279.p
MAATFSFARVVALFFLVAAHPHGCCGCGYLPDLFCYPPPPPAPTTNVPATNVPASNIPAPNSNSSSDEGWLDARATWYGAPNGAGPYDNGGACGFKNVNWPPFSSMTSCGNQPIFKDGKGCGSCYQIRCVAHRACSGVXETVIITDMNYYPVSRYHFDLSGTAFGGMAKYGRHDELRHAXGIIDMQFKRVPCQYPGLTVTFRVQHGSNPNYLAILVEYXDGAGXVSQVDIMESRLPDRAPTGYWTPMRESWGSIWRLDRLRPLQGPFSLRVTDESGRSLVADQVIPAYWQPNAAYRSLVQFDETLPMSLVTSAATSRPRLVLPMMYSAALTYVWPCVRWILAV

SEQ ID NO: 10819 - protein, 221 aa, Triticum aestivum
  unsure (1)..(221): unsure at all Xaa locations
  Clone ID: TRIAE-23APR03-C730_1285.p
HPLPPALSFPSAAEAPCFHPPPLAPVLPPAVGGPLASPRRHAPACHIRRQAAPTAERVQRWLRRPHPSLPSRGLWFPPGCRQKRRSCTHGRRAPRPDAVRLPPQRPLQPTPVVRTAKLPSPLDLTFLLLYCCCLFFGRDQSLSPADGNLNDEENLVCLLLCRQLMATPIYNSAWLAKAVKVYMKRENAGSWNSGLENEQILETYYXQLQKVLKLHEDTFWN

SEQ ID NO: 10820 - protein, 117 aa, Triticum aestivum
  Clone ID: TRIAE-23APR03-C730_1298.p
MSTEKKQLNTMREIKVQKLVLNISVGESGDRLTRAARVLEQLSGQSPVFSKARYTVRSFGIRRNEKIACYVTIRGEKAMQLLESGLKVKEYELLRRNFSDTGCFGFGIQEHIDLGMK

SEQ ID NO: 10821 - protein, 87 aa, Triticum aestivum
  Clone ID: TRIAE-23APR03-C730_1332.p
MATVPVNPKPFLQNLTGKMVIVKLKWGMEYKGYLVSVDSYMNLQLSGTEEYIDGQCSGNLGDILIRCNNVMYLRGVPEEDTDIPDAA

SEQ ID NO: 10822 - protein, 98 aa, Triticum aestivum
  Clone ID: TRIAE-23APR03-C730_1341.p
MAASVACAFFFDAEPAGEPGKHALDACALCAKRLARDSDVFMYRGDTPFCSEECRHEQMYLDAVCARRAARRPQRFSAETETESHRGQRQSRKVSIAS

SEQ ID NO: 10823 - protein, 121 aa, Triticum aestivum
  unsure (1)..(121): unsure at all Xaa locations
  Clone ID: TRIAE-23APR03-C730_1353.p
MAATGEETVRASHILIKHEGSRRKASWKDPEGRVISATTRADXAARLGDLRAQILAGRASFADLAAQHSDCSSARRGGDLGTFGRRQIQKPFEDAXYALKVGEISDIIDTESGVHIILRTA

SEQ ID NO: 10824 - protein, 376 aa, Triticum aestivum
  unsure (1)..(376): unsure at all Xaa locations
  Clone ID: TRIAE-23APR03-C730_1371.p
MGQLSKKLLLASMVAAVLAVAAVELCSAIPLEDNDLESEEALWDLYERWQTAHRVPRHHAEKHRRFGTFKSNVHFIHSHNKRGDRPYRLRLNRFGDMDQAEFRATFAGSRVSDRRRDGPATPPXSVPGFMYAAVNVSDLPRSVDWRQKGAVTGVKNQGKCGSCWAFSTVVSVEGINAIRTGKLXVSLSEQELIDCDTADNDGCEGGLMDNAFEYVKKNGGLTTEAAYPYRAANGTCKAAKSSPVVVRIDGHQDVPANSEEALAKAVANQPVSVAIDASGKAFMFYSEGVFTGDCGTDLDHGVAVVGYGVAEDGKAYWTVKNSWGPSWGEKGYIRVEKDSGAEGGLCGIAMEASYPVKADSKPKPKPRRALGAWESQ

SEQ ID NO: 10825 - protein, 342 aa, Triticum aestivum
  Clone ID: TRIAE-23APR03-C730_1373.p
MEKKKVAVSKVCHGHSRPVVDLFYSPVTPDGYFLISASKDSNPMLRNGDTGDWIGTFEGHKGAVWSSCLDTNALRAASGSADFSAKIWDALTGNELHSFEHKHIVRACAFSEDTHMLLTGGVEKILRIYDMNRPDAAPRELDKTPGSVRTVAWLHSDQSILSSCSDMGGVRLWDVRSGKIVQTLETKAPVTSAEVSQDGRFITTADGSSVKFWDANHFGLVKSYDMSCTVESASLEPKSGSKFITGGEDMWVHVYDFFTGEEIACNKGHHGPVHCVRFAPVGESYASGSEDGTIRIWPLNPANTEDPEAPNANGKPKSAAVANEVARKIEGFHITKEGQTEA

SEQ ID NO: 10826 - protein, 371 aa, Triticum aestivum
  Clone ID: TRIAE-23APR03-C730_1390.p
MGQLSKNLLVAAVLAVAAVELCGAIPLEDKDLESEEALWDLYERWQTAHRVPRHHAEKHRRFGTFKSNAHFVHSHNKRGDRPYRLRLNRFGDMSQAEFRATFVGDFRRDTLATPPSVPGFMYAAVNVSDLPPSVDWRQKGAVTGVKDQGKCGSCWAFSTVVSVEGINAIRTGSLVSLSEQELIDCDTADNEGCQGGLMDNAFEYIKSNGGLITEAAYPYRAAQGTCNVARAAQNSPVVVHIDGHQDVPANSEEALAQAVANQPVSVAVEASGKAFMFYSEGVFTGSCGTELDHGVAVVGYGVAEDGKAYWTVKNSWGPSWGEQGYIRVEKDSGVAGGLCGIAMEASYPVKTDSKPKPTPTPRRALGARESQ

SEQ ID NO: 10827 - protein, 69 aa, Triticum aestivum
  Clone ID: TRIAE-23APR03-C730_1397.p
MPKQIHEIKDFLLTARRKDARSVRIKRTKDAVKFKVRCSRYLYTLCVHDTDKANKLKQSLPPGLNVQEV

SEQ ID NO: 10828 - protein, 153 aa, Triticum aestivum
  Clone ID: TRIAE-23APR03-C730_1410.p
MMGSNNPGGAGGGGGMAPGTGAGGSDGRHDDEAVLTEFLSSLMDYNPTIPDELVEHYLGRSGFHCPDIRLTRLVAVAAQKFISDIASDSLQHCKARVAAPIKDNKSKQPKDRRLVLTMDDLSKALREHGVNLKHPEYFADSPSAGMPPSTREE

SEQ ID NO: 10829 - protein, 346 aa, Triticum aestivum
  unsure (1)..(346): unsure at all Xaa locations
  Clone ID: TRIAE-23APR03-C730_1419.p
MATRYWIAALPVADDNVAAGKTALWARLQDAISRHSFDTPLYRFTVPDLRPGTLDSLLALSDDLVKSNIFIEGVSHKIRRQIEDLERAGGVEPGTLTVDGVPVDSYLTRFVWDEGKYPVNAPLKETVASIQSQVAKIEDDMKVRVAEYGNVKSQLGAINRKQTGSLAVRDLSNLIKPEDMVTSEHLVTLISIVPKYSQKDWLSSYESLDTFVVPRSSKKLHEDNEYALYTVTLFAKVVDNFKVHAREKGFQIRDFEYSPEAQESRKQELEKLLQDQEVMRTSLLQWCYASYSEVFSSWMHFSAVRVFVESILRYGXACTVPVCCPSTIYKEREESKEHLGRAMRQC

SEQ ID NO: 10830 - protein, 564 aa, Triticum aestivum
  Clone ID: TRIAE-23APR03-C730_1424.p
MALLAAATLNPTTHLSLRSRAGRNSENLWLRSAASSQKSKGRFCNLTVRAGTPSKPAEPIGPVFTKLKPWQIPKRDWFDKDFLFGASTSAYQIEGAWNEDGKGPSTWDHFCHKYPERISDGTNGDVAADSYHLYEEDVKALKDMGMKVYRFSISWSRILPNGTGEVNQAGIDYYNKLINSLISHDIVPYVTIWHWDTPQALEDKYGGFLDLQIVDDYKQFAKVCFESFGDRVKNWSTFNEPHTYCCFSYGEGIHAPGRCSPGMDCAVPEGDSLREPYTAGHHILLAHAEAVEMFRTHYNMHGDSKIGMAFDVMGYEPYQDSFLDDQARERSIDYNLGWFLEPVVRGDYPFSMRSLIGDRLPVFTKEEQEKLASSCDIMGLNYYTSRFSKHVDISPDVTPKLNTDDAYASSETTGSDGNDIGPITGTYWIYMYPKGLTDLLLIMKEKYGNPPIFITENGIADVDGDETMPDPLDDWKRLDYLQRHISAVKDAIDQGADVRGHFTWGLIDNFEWGSGYSSRFGLVYIDKNDGFKRKLKKSAKWFAKFNAVPKHLLGYYQANWATPV

SEQ ID NO: 10831 - protein, 121 aa, Triticum aestivum
  Clone ID: TRIAE-23APR03-C730_1441.p
MAATGEETVRASHILIKHEGSRRKASWKDPEGRVISATTRADAAARLGDLRAQILAGRGSFADLAAQHSDCSSARRGGDLGTFGRRQMQKPFEDATYALKVGEISDIIDTESGVHIILRTA

SEQ ID NO: 10832 - protein, 264 aa, Triticum aestivum
  unsure (1)..(264): unsure at all Xaa locations
  Clone ID: TRIAE-23APR03-C730_1446.p
MAPLSSKAVALVALFSLLVTYAAGAGNFNDSAFTADPNWEDARATWYGAPTGAGPDDDGGACGFKNTNQYPFSSMTSCGNEPIFKDGXGCGSCYQIRCTNDQSCSGNPETVVITDMNYYPVAKYHFDLSGTAFGAMAKPGLSEKLRHSGIIDIQFKRVPCEFPGLKVTFHVEQGSNPVYFAVLVEYEDGDGDVVQVDLMEANSGTWTPMRESWGSIWRLDSGHRLQAPFSMRITNESGKTLVADKVIPANWAPSTFYRSIVQYS

SEQ ID NO: 10833 - protein, 412 aa, Triticum aestivum
  unsure (1)..(412): unsure at all Xaa locations
  Clone ID: TRIAE-23APR03-C730_1451.p
MCSHGHAEPATACVTCPPPSQGRLITVLSIDGGGIRGLIPSTILACLESKLQELDGPDARIADYFDVIAGTSTGALVTSMLAAPGENKRPLFEAKEINKFYLDNGPKIFPQRSWGLLTPIGNMFGAVMGPKYDGKFLHDKIKSLTNDVTVADTVTNIIVPTFDVKYLQPIIFNTYEAKVDPLKNAHLSDICISTSAAPTYFPAHYFTTRDPAGKLPXREYHLIDGGVAANNPTMAAMSMITKEVLRRNXRLHARASPAEYGNYLIISIGTGSAKXPEKYTAPDCAKWGVLRWLYDGGFTPLIDIFSHASADMVDIHAAVLFQALRIEKNYLRIQDDSLTGHTSSVDIATKENMEALIGIGKNLLKKNVSRVNIDTGMYESVDGEGTNEEALARFARKLSVERKLRQTNLNSK

SEQ ID NO: 10834 - protein, 171 aa, Triticum aestivum
  Clone ID: TRIAE-23APR03-C730_1470.p
MACRALALRTLLLPDPLHHLSLRAAASAPAAPFPCRRRRRNLRCCSSSSGGGPGEQGQPPQEAVLEAISSGTVTDDSSDEWLVLDQKVNTYPTDRGFTAIGTGGEDFVHSMVDAVESVLQESIPKGQVSQKISSRGKYVSVKIGPIRVASSEQVQAVYRAMRRDNRMKYFL

SEQ ID NO: 10835 - protein, 284 aa, Triticum aestivum
  Clone ID: TRIAE-23APR03-C730_1474.p
MGKPQLTLLGVAAVLLLSSSLHGARAEEESAGLDTGVAGEPGVLNSSAVSIGQSGVARATWYGAPNGAGPYDNGGACGFKNVNRYPFMAMTSCGNQPLFKDGKGCGACYKIKCTKHKACSGRQETVVITDMNYYPVAPYHFDLSGTAFGKLAKPGRNDELRHAGIIDIQFTRVPCEFPGLKVGFHVEEGSNAVYMAILVEYENGDGDVVQVDLMESGRRGGGGGRWTRMRESWGSIWRLDSNHRLQAPFSLRIRNESGKTLVARNVIPKNWRPNTFYRSIVQYS

SEQ ID NO: 10836 - protein, 210 aa, Triticum aestivum
  Clone ID: TRIAE-23APR03-C730_1481.p
HRSPTPSPHLIPLRPRFLLLFLPLTPEAKPREVPMASTTFSSAFSILSLPSSSPSPSASAPRTLPVANRRRRAVAVASTATESPKVLELGDAIAGLTLEEARNLVDHLQERLGVSAASFAPAAAVAAPAAAAAEEAPVEKTEFDVVIEEVPSSARIATIKVVRALTNLALKEAKDLIEGLPKKLKEAVSKDEAEEAKKQLEGVGAKVSIA

SEQ ID NO: 10837 - protein, 192 aa, Triticum aestivum
  unsure (1)..(192): unsure at all Xaa locations
  Clone ID: TRIAE-23APR03-C730_1485.p
MAAAAAGAASAAAAPATHHADHSMNALRSTAFRRSTLHWDAAAAFFSPPFRSRRCHRRVLLPPAAALPAKSRSRAKAKLLADAGAVDPWLASLSLLPAGGGXATAASAAVAEATAAAAATEAAAATAVVAATAASAAVAAATPAASGGTEPRISQLSIYLPCRRRRRRLRQQVIFGVVVFLCQSESSCVWCF

SEQ ID NO: 10838 - protein, 887 aa, Triticum aestivum
  unsure (1)..(887): unsure at all Xaa locations
  Clone ID: TRIAE-23APR03-C730_1490.p
MADAPVELPGRLAILPFRNKVLLPGAIVRIRCTNPSSVKLVEQELWQREDKGLIGVLPVRDSEAAAVGSILSPGVGSDSGEGGRRSPGGSGGESTKQDAKSGKEPIHWHSRGVAARALHLSRGVEKPSGRVTYIVVLEGLCRFSVEELNARGSYHVARVSRLDMTKTELEQAEQDPDLIALSRQFKATAMELISVLEQKQKTVGRTKVLLETVPVYRLAXDIFVASFEISFEEQLAMLDSVDLKVRLSKATELVDRHLQSILVAEKITQKVEGQLSKSQKEFLLRQQMRAIKDELGDNDDDEDDIAALERKMQNAGMPANIWKHAQRELRRLRKMQPQQPGYSSSRAYLELIADLPWQKVSEERELDLRAAKESLDRDHYGLTKVKQRIIEYLAVRKLKPDARGPVLCFVGPPGVGKTSLATSIAKALNRKFIRISLGGVKDEADIRGHRRTYIGSMPGRLIDGLKRVSVNNPVMLLDEIDKTGSDVRGDPASALLEVLDPEQNKTFNDHYLNVPFDLSKVVFVATANRMQPIPPALLDRMEVIELPGYTPEEKLKIAMKHLLPRVLEQHGLSSAYLQIPEAVVKLIIERYTREAGVRNLERNLAALARAAAVKVAELDSTLRLGKEMQPITTTLLDSRLADGGEVEMEVIPMGQDISNTYENSSPMIVDEAMLEKVLGPPRFDDREAADRVSFPGVSVGLVWTSFGGEVQFVEAAAMAGKGDLHLTGQLGDVIKESAQLALTWVRARSADLNLSPTSDINILESRDIHIHFPAGAVPKDGPSAGVTLVTSLVSLFSNRKVRADTAMTGEMTLRGLVLPVGGVKDKVLAAHRYGIKRVILPERNLKDLAEIPAPILAGIEILLVKRIEEVLGHAFENGFPLRLHSSL

SEQ ID NO: 10839 - protein, 341 aa, Triticum aestivum
  unsure (1)..(341): unsure at all Xaa locations
  Clone ID: TRIAE-23APR03-C730_1504.p
MAQTPPIPRVSLGTQGLEVSKLGFGCMGLTGSYNSPVEDDAGVAVITHAFRRGVTFFDTSDVYGPHANEILLGKALKQLPREQVQVATKFGIQRDAQGKSTICGRPEYVRACCEASLHRLGVDHIDLYYQHRIDTTIPIEDTIGELKKLVEEGKVKYIGLSEASPDTIRRAHAVHPISAVQMEWSLWARDIEPEIVPXCRELGIGIVPYSPIARGFFGGRGVXQQVSAEXSLKGHPRFSAENLEKNKQLYLKMEELAKKHQCSPAQLALSWVXHQGDDVVPIPGTTKIKNXDSNIDSLKVRLTEDDLKEISNEIREEDVAGGRQYTXFAKFTWNYADTPKK

SEQ ID NO: 10840 - protein, 572 aa, Triticum aestivum
  unsure (1)..(572): unsure at all Xaa locations
  Clone ID: TRIAE-23APR03-C730_1540.p
MALLAAATLNPTTHLSLRSRAGRNSENLWLRSAASSQKSKGRFCNLTIRAGTPSKPAEPIGPVFTKLKPWQIPKRDWFDKDFLFGASTSAYQIEGAWNEDGKGPSTWDHFCHTYPERISDMTNGDVAANSYHLYEEDVKALKDMGMKVYRFSISWSRILPDGTGKVNQAGIDYYNKLINSLIDNDIVPYVTIWHWDTPQALEDKYGGFLNRQIVDDYKQFAEVCFKNFGDRVKNWFTFNEPHTYCCFSYGEGIHAPGRCSPGMDCAVPEGDSLREPYTAGHHILLAHAEAVQLFKARYNMHGDSKIGMAFDVMGYEPYQDSFLDDQARERSIDYNMGWFLEPVVRXGDYPFSMRSLIGDRLPMFTKEEQEKLASSCDIMGLNYYTSRFSKHVDMSPDFTPTLNTDDAYASSETTGSDGNDIGPITGTYWIYMYPKGLTDLLLIMKEKYGNPPVFITENGIADVEGDESMPDPLDDWKRLDYLQRHISAVKDAIDQGADVRXGHFTWGLIDNFEWSLGYSSRFGLVYIDKNDGXNKRKLKKSAKWFSKFNSVPKPLLKTTNNNATMTAASVSV

SEQ ID NO: 10841 - protein, 394 aa, Triticum aestivum
  Clone ID: TRIAE-23APR03-C730_1607.p
MERGLALLGLGLALLLLAPSRRLASAAPVEDGLLMNGDFETAPPGGFVKSASVSEGAAIPSWTINGTVELISAGQHQGGMILIVPQGDHAVRLGNDAGIGQVVEVEKGSEYAITFSAARTCAQLESLNISAGSVSQTVDLQTLYSIEGWDAYALAFQAVDEQASIEFRNPGMEDDPTCGPILDNVAIKKLFSPDKAKENMVINGDFEEGPWMFANTSFGVLLPTNLDEQTSALPGWMIESNRAVRFVDSDQYTVPQGKRAIELLSGKEGIISQMVETTPQKAYTLTFTLGSAGDSCQPPMAVMAFAGDQAQNFHYSPMGNATSQAVNVNFTARAERTRVALYSVYYNTRSDDHSSLCGPVIDDVRVWGLNGAAGLKASIALLIAMASVIVLVLF

SEQ ID NO: 10842 - protein, 748 aa, Triticum aestivum
  unsure (1)..(748): unsure at all Xaa locations
  Clone ID: TRIAE-23APR03-C730_1608.p
MAAHSVAAAHATIAARAGAAPSSPAAAPAERLGFRLSSLAGRALRSPLPARRAAAAAAASPSSRRSGSQRVRASAAVETVEAAATGXLLDKSVNAIRFLAIDAVEKAVSGHPGLPMGCAPMGHILYDEVMRYNPKNPYWFNRDRFVLSAGHGCMLQYALLHLAGYDAVKEEDLKQFRQWGSSTPGHPENFETPGVEVTTGPLGQGIANAVGLALAEKHLAARFNKPDSEIVDHYTYCIVGDGCNMEGILTEACSLAGHWGLGKLIVFYDDNHISIDGDTEIAFTEDVSGRFEALGWHTLWVKNGNDGYDEIRKAIQEAKSVTDKPTMIKVTTTIGFGSPNKANSYAVHGAALGTSEVEATRANLGWPYEPFFVPEDVKSHWSRHIPQGAALEADWDAKFAQYEQKYPEDAATLKSIITGELPAGWADALPQYTTESPADATRNLSQQCLNALAKVVPGLIGGSADLASSNMTLLKMFGDFQKDTPEERNVRFGVREHGMGAICNGIALHTPGLIPYCATFFVFTDYMRGAMRISALSEAGVIYVMTHDSIGLGEDGPTHQPIEHLVSFRAMPNMLMFRPADGKETAGAYKVAVLNRKRPSILALSRQKLPHLPGTSIEGVAKGGYTISDNSTDNKPDYIIMSTGSEVEIAVKAAEELTKEGKTVRVVSFVCWELFDEQSDEYKESVLPEAVTARISIEAGSTLGWQKYVGSKGKTIGIDKFGASAPAPKIYKEYGITAENVIAAAKSL

SEQ ID NO: 10843 - protein, 304 aa, Triticum aestivum
  Clone ID: TRIAE-23APR03-C730_1616.p
MGMVRAAWFLLLLALLAAADARRQKGGETACDKGWECSGSRFCCNETITDYFKAYQFEELFAKRNNSLAHAAGFWDYKAFITAAALYEPRGFGTTGGREMSMKEVAAFLGHVGAKTSCGYSLADGGSLAWGLCYNHEMSPSQSYCDDSNELYRCAEGVEYYGRGALPVYWNYNYGIVGKGIKQDLLNHPELLEQNATLAFEAAIWRWMTPMKRKQPSAHDAFVGNWKPTKKDTLSKRYPGFGATMNILYGDAICGKGSIDNMNGIISHYQHYLDLMGVGAQHSGDNLDCADQVPFNPSSKSPDS

SEQ ID NO: 10844 - protein, 124 aa, Triticum aestivum
  Clone ID: TRIAE-23APR03-C730_967.p
MAQGSGSATAVLVLVLLCVLLHGDFAESKVYTVGDRAGWALSSGGWPRGKRFRAGDVLLFRYGRGAHNVVAVSAAAYKSCSAARGGRTYNSGSDRVTLSRGTNYFICSVPGHCQAGMKMAVTAA

SEQ ID NO: 10845 - protein, 120 aa, Triticum aestivum
  unsure (1)..(120): unsure at all Xaa locations
  Clone ID: TRIAE-23APR03-C730_988.p
RSRHKRSRMQVSITKKAIMLYVNLDKRYMQMHHEGDLSALGMAIATVVTVVEILKNNGLAVEKKIMTSTVDVNDESRGRPMQKSKIEIVLGKTENFDELXMVAAAEEREVAAAEDGEEQG

SEQ ID NO: 10846 - protein, 554 aa, Triticum aestivum
  unsure (1)..(554): unsure at all Xaa locations
  Clone ID: TRIAE-23APR03-C7327_1.p
MEVVLEVFKHGSAHGARAAIRADQKSYSLVQLISSALDVHNILRMKTXGKDSYVNGANATGFLCGARIGIVARPCAEFIAGIFXTWRSGGIAVPRALRYLEVELLQVRNDLNISKVSSFIVLRPSKHGISTICSTRYSVLPTVDILPRKIDAQESLSSGLTSAVYGLMADIDTLKKIKADGHARILYKSGTTGKPKGVVHTHEAILSQGQILTEAWGYHSEDQFLHCLPLHHVHGLFNALFXPLYSGSVVEFLPKFSVRGVWQRWRESYPNDGSKNDEAITVFTGVPTVYTRLLQRYDSMNPSYQAACFCLTMLRTLVLCGPPTIPSPVVKRXHIVACHRLTELYPTPATPMHLARKEGTVGKPLPRVEAKIIMDDGTETKTGVGELCIKSPSLFKXYWKRPEVTAESFIQQNHLLMXGFFKTGDTVTVDEDGALICRGRASAGFLVVGGCKWAASXVHDTVLECAVXLECAVLGLPDEAYGEAICAIIVPKEDAKEKAEQASKPALTLEALTSWSKDKLAPYKIPTRLHLWDSLPRNAMGKVNKKELKKLLEV

SEQ ID NO: 10847 - protein, 149 aa, Triticum aestivum
  Clone ID: TRIAE-23APR03-C73299_1.p
LQICRSTAAAPVKKVSRQVASKACSFVGSTPLPATAAAPSVQPKPQISMRELIEKKKMTAVGSTLRAGGGPGAGCRRVAPPSGSPAGGTLTPVGASALRGWPAPPGKSGMGELSCKILSGNGPPLNRVTAAAPRKQPIPWVRPVVLRPC

SEQ ID NO: 10848 - protein, 240 aa, Triticum aestivum
  unsure (1)..(240): unsure at all Xaa locations
  Clone ID: TRIAE-23APR03-C732_192.p
MRVGSRVVVLVRDSAGYGAALADALRPSPGLTRGSSPFDLPLDKYGLNGEKASGXLVSFSDSSGSPQVSFFVLPDYRPPVAACAMNEILALISSEAPSIQPILIVPFITRPSGCFHGMVNATKTGQLTTLHAAEIGASNEFTHLLVDGIIKPPPSLQIRGEPIQCLLEMVRVLKIPTVLLVTSGGQHQGKSSSDSDLEVLQCVGDHVAKHINLEFSKETVIETGVEKSASIQEPWRELYL

SEQ ID NO: 10849 - protein, 149 aa, Triticum aestivum
  Clone ID: TRIAE-23APR03-C732_205.p
LCYILLLSVCWSILISSSLFSHLVIFTPFCQLPPIMEGDGLARPSTPIGNFRQAPSRSSSPYSDAFMAKIISRSKKVKRQLWLKLCLFCVLCMIDLILLASLQIQVIWLLQCILLRVYLFALIFSPFWAPNRLWVISYCALLMINLQFK

SEQ ID NO: 10850 - protein, 166 aa, Triticum aestivum
  Clone ID: TRIAE-23APR03-C732_220.p
MASVRPPLRRLALLLNSRIRANNRFLASASTSTSSYPTAAAAGTATTETPAPEEPEVVSMTDNCVRRLKELHTKEPSAKGNMLRLSVEAGGCSGFQYTFSLDSKENADDRVFEKNGVKLVVDNVSYDFVKGSTIDYVEELISSAFVVSTNPSAVGGCSCKSSFMVK

SEQ ID NO: 10851 - protein, 318 aa, Triticum aestivum
  unsure (1)..(318): unsure at all Xaa locations
  Clone ID: TRIAE-23APR03-C732_227.p
MATVEQQQQIEHSHLAIRGLSLHVAQAGTGELGTVLFLHGFPEIWYSWRHQMLAVAAAGYRAIAPDWRGYGLSDQPPEPEAAVYRDLTEDLLAVLDALSVPKAYLVAKDFGAMPAYDFALRHPNRTCGVMCLGIPFLHGGSSFTXCPKAFYILRWAXPGRAEADFGRYDVKRVVRTIYILFCRSEIPTAKEDQEIMDLADLWTPLPEWFTEEDLAVYTSLYEKSGFVYPLQMPYRSLHKRHPIEDPKFEVPVFVVMGEKDYVIKFPGVEAVLKNGTMEKFAPDLKITYIPEGSHFVQEQFPDKVNELLLGFLKDHPVA

SEQ ID NO: 10852 - protein, 145 aa, Triticum aestivum
  Clone ID: TRIAE-23APR03-C732_242.p
MFSIADFATPNARMFSISAFAPPSLPTPPPKADPSPNLFVSGLSKRTTTDGLREAFAKFGEVEHARVVTDRVTGFSKGFGFVRYVTVEDAAKGIEGMDGKGSLGAFLDGWVIFAEYARPRPPPQMGGATPQPQQSWGTPGSWGSQ

SEQ ID NO: 10853 - protein, 283 aa, Triticum aestivum
  unsure (1)..(283): unsure at all Xaa locations
  Clone ID: TRIAE-23APR03-C7330_1.p
RESQISRAPRLRPTTRASRQQQRRQIASSRGGEEGGSGEDGEGQAGFPTPPAKRRRAAPPAPPLSAHCHRRIIKWQQMDMEYTLCQMFPHCTSPAXTNNHTPTKNQXARDNPVFMVMLILSLLFSTLSACCVNNDLLSICSVVFVHFWFARLVLATLCWFLTNSYLREEPNSHVVEQRVEWLYAFDVHCNSFFPAFVILYVLQYFLSPLLIAHGFLPALLSNLLFMVAISYYHYLNFLGYDVLPFLDRTTFFLYPIGLVIILSPLMILIGFNPTRYFLSLYFR

SEQ ID NO: 10854 - protein, 260 aa, Triticum aestivum
  unsure (1)..(260): unsure at all Xaa locations
  Clone ID: TRIAE-23APR03-C733_1.p
PRFASSVRRAVVSADVARPPPPDLHTAGESEPPAAPPESRGFDEELTLAGEDGDWVVRFEQSFNVFLTDTVIFILDILYRDRDYARFFVLETIXARVPYFAFISVLHLYETFGWLXERADNIKVHFAESMNEFHHLLIMEALGGNSVWLDRFLARFSAFFYYFVTVGMYMLSPRMAYHFSECVERHAYSTYDKFLKLNGEELKKLPAPEVAVNYYMNEDLYMFDEFQTSRAPNSRRPKVDNLYDVFVNVRDDEXRSIARQ

SEQ ID NO: 10855 - protein, 112 aa, Triticum aestivum
  unsure (1)..(112): unsure at all Xaa locations
  Clone ID: TRIAE-23APR03-C73540_1.p
MATPTVEKPDGVEIREVWAENLEAEFAVIREIVDDYPYVAMDTEFPGVVCRPLGTFKSNADFNYATLKANVDMLKLIQLGLTFSDERGGLPALGPDGRXASRQFNFRGEQAR

SEQ ID NO: 10856 - protein, 535 aa, Triticum aestivum
  unsure (1)..(535): unsure at all Xaa locations
  Clone ID: TRIAE-23APR03-C735_1.p
KDHWYRYRIRHEIVEYAYQRTKNFERLTFLYLITGYMDKVGFMCKIAGQNNNLMGQFHNALYLGDARKRAEILENAGQLPLAYVTAATHGLTEIAERLASELGENVPSLPEGKTRSLLILPARLISTVDWRLLRVRRGMSWRGLDTGGRADXEVDEVKELIEXSEGVCSWSKNGTQEEGIEGQRQPATGTGGLLHQLQAPEGSHEACALKRHGSMLQAEELCDRGALCKAAPREQPQRGPSEEGSAAGNFDTAMRLLSRQLGIKNFAPLKALFLDAHMGSHTFLRAFASAPVIPIAVEKGWSESASPNVRGPPALVFSFAQMDDKLKAAYKATTEGKFPEALRQFLNILYTIPLLVVDSRREVDEVKELIEIVREYVLGLRMEVKRKELKSDATRQQELAAYFTNCKLQKVHMRLVLTSAMGLCFKGGNYATAANFARMLLDNGPNEAQAKKARQVLQACGDRKDAHQLNYDFRNPFVVCGATFVPIYRGQKDVSCPYCASRFVPSVEGQLCSICELSVVGADASGLLCSPTQSR

SEQ ID NO: 10857 - protein, 159 aa, Triticum aestivum
  Clone ID: TRIAE-23APR03-C7391_2.p
MAQAIEAQREGAEVYHGAALCAEKAVELLAETNMPLGLLPLADIEEVGYNRATGFVWLRQKKALTHTFKQIGRQVSYGTEVTAFVEDRKMKRMTGVKSKELLIWITLCDMYIEKDDPSKITFKTPTGLGRTFPVSAFEKQDDGKAKAAAADGKEAVVAK

SEQ ID NO: 10858 - protein, 306 aa, Triticum aestivum
  unsure (1)..(306): unsure at all Xaa locations
  Clone ID: TRIAE-23APR03-C7396_1.p
MKEVEGLPRARAALCPASSGPRQVPAWWLGFPRVAPISRGRPVRRGRKASGRDCGGGEGARPNGHAGDGGDPAEWKKVPGRRRGGKARVAAAEGEAGRVLGPGQRSRDGNVGKAAAMFLKPLPRTRASQPRGSITDAPVRGELVQDKLYVQGFDSAGRPLVYLFGHRLVAAGRPLVDLFRYRLFAPDRARAEFKRYVVYILDNTCTKLPAGPDYDIRAKLAALGGLPNCDPRPLRAALEIMVPYVFMPAWKMVYPFIDDNTKKKFVFVADKDLDATLRDAIVXSQLPEQYGGKLRLEGYKSSSTCN

SEQ ID NO: 10859 - protein, 214 aa, Triticum aestivum
  unsure (1)..(214): unsure at all Xaa locations
  Clone ID: TRIAE-23APR03-C74218_1.p
MRELVSSSTSSPTAALVAAGHAALRGWWEEVNESPAWQDGAFFSLTAAYALVSAVALIQLVRIQRRVPEFGWTTQKVFHLMNFVVNGVRAVVFGFHAYVFLLQTKVYKLVLLDLPGLLFFSAYTLLVLFWAEIYHQARSLPTDKLSIIYLAVNSIVYAIQICIWVYLGXNDNALVELGERKSSSASGSAVPQAEYPAQYHPINWRFLWLCMMLC

SEQ ID NO: 10860 - protein, 224 aa, Triticum aestivum
  Clone ID: TRIAE-23APR03-C7435_1.p
MASGDPKPDENYSSDGGDTTDAESSDESPHQPRRGPRANPILTRLSVSRNPSPLSAATAAPGVCLLRFAWESAAGSLVGAVVGYGKGLVTTKGFKGSFADAASSAKIFAVLAGVQSLVSCSLRKLRGKDDVINAGVAGCCTGLALSFPGAPQTLIQSCLAFGTFSYIIEKLNRQQPALALPSAAGLKDLKAGPSVLPPFTLNMPHDAMEGFSSFQNFLSKFRES

SEQ ID NO: 10861 - protein, 289 aa, Triticum aestivum
  Clone ID: TRIAE-23APR03-C7494_1.p
RSIARVRPRSRRLLSSPHPAAAGQRDPASEIRPTPSPSPSPPRRRRLLRHVAFQRSKVHRALHHASGRQGQRLQVAPTTEARGFQVATPLPPPPPFPPKGVRTISRSPPPSSRRRSVSRSPPPKRRGRSRSRSRSRNRSRSRSRDKDDVRNPGNNLYVTGLSTRTQETDLEKFFSKEGKVKDCRVVIDPRTKESRGFAFVTMENVEDARRCIKYLHRTVLEGRLISVAKAKRTRERTPTPGEYCGPRGGRSRVEPRRSRSPRRSSRSSRDRSRSPAARRDRDSRDRKRD

SEQ ID NO: 10862 - protein, 422 aa, Triticum aestivum
  Clone ID: TRIAE-23APR03-C74_2.p
MDKLKGSARLMIVSDLDHTMVDHHDEENLSLLRFGALWESVYCQDSLLVFSTGRSPTLYKELRKEKPMLTPDITILSVGSEITYGEAMVPDHGWEEYLNNKWDRNIVLEETAKFSELKLQVESEQRPHKVSFLVDKKNAQGVIKSLSEKFEKRGVDAKIIYSGGQDLDILAQGAGKGQALAYLLKKLGSCGKTPNNTLACGDSGNDAELFSIPGVHGVMVSNAQEELLQWHAENAKDNPKIIHATERCAAGIIQAIGHFKLGPNVSPRDVEFPYIKEDPFKPTAAIVKFYVLYEKWRRADVPKADSVIQYFKNITDANGVIIHPSGVELSIHSAIDELASCYGDKQGKKYRSWVDRLVILQTASDSWLVRFDLWEAEGAAWACCFTTLALNVKPETPGGFVVTHIHKTWRKEYPGVEQSCKL

SEQ ID NO: 10863 - protein, 325 aa, Triticum aestivum
  unsure (1)..(325): unsure at all Xaa locations
  Clone ID: TRIAE-23APR03-C7519_1.p
MAMRRRLPQFQAILAQQAVRSAIPKPRPLANPHSRLLHCASPPVAASRCPLSHSLWRSPGSAGTLLPVSAAAVASAARAAAKRWLTARAAGSLELFSLQRRRSPGLLSSSSTFLRRVPWGRWLPSADGMVLMLMGANVAVFMLWQMASPDFMRDHFSISLDNLKSGRLHTLLTNAFSHYDSGHLFGNMMSLYFFGSNISSAFGPAFLLKLYIAGALVGSTFFLXDKAFIAPRRQIYAGWDVLRSNALGASAAVNAIVLLHIFLKPKGLIYLYMVIPVPAALVGVAWIGLDLWRVNKGQGQTSGASHLGGTLVAALVWARIRKGWI

SEQ ID NO: 10864 - protein, 179 aa, Triticum aestivum
  unsure (1)..(179): unsure at all Xaa locations
  Clone ID: TRIAE-23APR03-C75395_1.p
MAAHGKPKPKPPGAPAPPPPPPPPTAAEAKKGFMRRMFPFLLAVNAFVGAYMLVRTYYKDSPAKTADAASATATASXPSESQEPVAAGAPVKPVLPPIPEDEQRRVYKWMLEEKRKVKPRDAAEKKRXDDEKALLQAHHPRPTPSRCSETGEAHHTDTPMGMSCYGNNGAGTACASLMV

SEQ ID NO: 10865 - protein, 135 aa, Triticum aestivum
  Clone ID: TRIAE-23APR03-C75553_2.p
MASAAYLETDENLEALISRIEQKSRKIETLLKQSKPVEALKTALEGSPLKTRDERCKLANWIVVHRAMMAIRDIDGMFNSLDTEYYDILMKYLYRGLSTGDRPTCDQCLKIHEKLTERAGLGCILRSLADTVNTV

SEQ ID NO: 10866 - protein, 203 aa, Triticum aestivum
  unsure (1)..(203): unsure at all Xaa locations
  Clone ID: TRIAE-23APR03-C75577_1.p
ARAQNRIFADERSTCEQLLSHPFIKRYEEARXVDLAAYVGGVVNPTERLKQIAEMLVVHYYLLFNGSDGSWHHMKTPYMEESSFRFSGNVYVGQSAIFDTLSTIRNKFKGDQPSGGIFHVVEKIHCGADGEREITVRVSGSFIVGNQFLILGEGLQAEGMPSPDELAIDIPSNRAGQFREQFIMQPGISMECYYIPRQDLSIS

SEQ ID NO: 10867 - protein, 211 aa, Triticum aestivum
  unsure (1)..(211): unsure at all Xaa locations
  Clone ID: TRIAE-23APR03-C7560_1.p
MGGSKGVERTLVVVRALVGFLRGLSAALGFAAVATRVKVSDVQTDSSPGECIYRSKPRAXLALMSPVAYLVRCALLHLLEASVCFRHHPGSLAPISYFVSWVTFIIXAFLLLLTGXAALNDQSGPGEPCTSASFCYVXVKPGGRSPGGAVLSLASVALAIVYYVALTSSKGPPSWGPQQNQGISMGQPVIPQQSSEPVFVHEDTYNRQQFP

SEQ ID NO: 10868 - protein, 207 aa, Triticum aestivum
  Clone ID: TRIAE-23APR03-C7564_1.p
MSNIGKSTNILWHDCPIGQTERQKLLGQKGCVIWITGLSGSGKSTVACALSRELHYRGHHTYVLDGDNLRHGLNRDLSFKAEDRTENIRRVGEVAKLFADAGTICIASLISPYRRDRDACRALLPDSRFIEVFMDLPLELCEARDPKGLYKLARTGKIKGFTGVDDPYESPVNSEIVIKMEGGECPSPKAMAQQVLSYLEKNGYLQA

SEQ ID NO: 10869 - protein, 339 aa, Triticum aestivum
  Clone ID: TRIAE-23APR03-C75670_1.p
MAIDSLIRRSRTAATARISAPAPATEVFSPTITMAQAPGRAASSMRLFDAHCHLQDPRIAAAAPALIRAATASGVGRFAVNGTSEKDWHLVKQMAQEHPAVIPCFGLHPWWVPERSPDWMDSLRQFFSETPEAAVGETGLDKGSHGKTIDFREQVEVFQRQLELAKELEKPVSVHCVRAFGDLLEILKRTGPFPAGVLLHSYLGSAEMVPGLANLGCYFSLSGFLTGMKSTKAKKMLKAIPLDRILLETDAPDAVPKLDNVSLVTVPVDISNADIEKFHGDSTSSKESLNHPANIHIVLKYVASLLEMPEAELAEASYRNATKLFSYPGSKVHPEAETV

SEQ ID NO: 10870 - protein, 318 aa, Triticum aestivum
  unsure (1)..(318): unsure at all Xaa locations
  Clone ID: TRIAE-23APR03-C75736_1.p
MSSSAAHQKAAAAAPVEEEAGEHGPFPIEQLQASGIAAVDVKKLKDAGLCTVESVAYSPRKDLLQIKGISEAKVDKIIEAASKLVPLGFTSATQLHAQRLEIIQVTTGSRELDKILEGGIETGSITELYGEFRSGKTQLCHTLCVTCQLPLDQGGGEGKALYIDAEGTFRPQRLLQIADRFGLNGADVLENVAYARAYNTDHQSRLLLEAASMMVETRFALMVIDSATALYRXLADEFGVAVVISNQVVAHSHGPAMFAGPQIKPIGGNIMAHASTTRLYLRKGRAEERICKVVSSPCLAEAEARFQISPEGVTDVKD

SEQ ID NO: 10871 - protein, 522 aa, Triticum aestivum
  unsure (1)..(522): unsure at all Xaa locations
  Clone ID: TRIAE-23APR03-C757_1.p
RAVRSLVRRFFHLPVSGKPPATRLSPAIASRITERALSTFAAAAXATRRRAARAAAATRAGRGRSPAAGAEAVAGAVGRRNHQRALHRGVCTGSGEALHRAAPSMALVGTLAALHLVSAGPLVDVGLAALRSPTVAAGGVVRGXARATGATHLCAAESADMPADRMERLRRSAMPAILTSPASSPPSTSPPRRRRDRRPAVVDVARSLPPGSASVRLNISARSPIALLEKTSDLLRWQHKNPSVHLPWKQHAFPILSDSSPLYLTPSEPAALTAEEERELQLAHDRLLAVGARCAEHDIPLLVDAEYASVQPSIDYFTFVGALACNGGGRPIVHGTVQAYLRDARDRLEAMVRAAEEERVCLGVKIVRGAYLTREARLAESLGVPSPIHGSIQDTHDCYNGCAAFLLERVRRGSASVMLATHNVESGQLAAARAQELGIGKGDRNLQFAQLMGMADGLSLGLRNAGFQVSKYLPYGPVEHIIPYLIRRAEENRGLLSASAFDRQLLRKELVRRFKNAVMGRE

SEQ ID NO: 10872 - protein, 839 aa, Triticum aestivum
  unsure (1)..(839): unsure at all Xaa locations
  Clone ID: TRIAE-23APR03-C75828_1.p
MADAPEQPTPDPPTPPQEAIQRPKKNKKGRRKKPKKVAAATAAPSSSGATMVEDPFLVLAGGKEGGFLELEEIDGADFGIFGSVVEDVGASEKKAWNDQKKKKKKKKRKRGDAKRLDGDVGGDGDGDGDCAGDSVAESEEGGEKGEKKGKRKKRNRDWRMVEVLDAEAWVVVAVVVAGVGLVDVRLLHHHATAVPRFRAGVLAAALELGLHPLRSMAVLGLGCQGPSPPRLAGVPAGALRPSGVCGAAETGSGKTLAFGLPILQRLLEEREKTTRLHVEDEKAAEGSSTGGPLRALILTPTRELAKQVCDHLKEAAQFLGIHVVPIVGGLSMEKQERLLKKKPEIVVGTPGRLWELMSSGNQHLVELHSLSFFVLDEADRMIERGHFKEVQSIIEMLPLSNSSDEQTVKATSSCETVANLQIKKRQTFVFSATLALSANFRKKLKRGLSTSKTATADDLSSIEALSKQAGMKPNAEIVDLTNASILPEKLEESFIECSDDDKDANLYYILSVHGQGRTIVFCTSISALRHISSLLRTLGINVLTNHAQMQQRARMKAVDRFREGENSVLVATDGFARGMDFDNVRTVIHYQLPHSSDVYIHRSGRTARKSLTGCSIALISPADKAKFYSLCKSFSKENLQQFPVDXAYMPAIMNRLSLAXRQIDKISSKSSKENANKSWLQXRNAESMGLILEASDSEEERVRGHKQRKATSAQLQKLQQDLNELLQHPLQPKTFSRRYLAGAGISPLLQKQLEELSKRNVNSNSSNDNNKGSRFVIIGQDRVEPLQALQDSGQEICVNMDKQKEKRRLAENWRRKKHEEKKSTREQKRKDRRSAKERD

SEQ ID NO: 10873 - protein, 488 aa, Triticum aestivum
  Clone ID: TRIAE-23APR03-C7584_1.p
MALRSSTATSLLSRTLRLLEPSAHRVPRVESRAASSSTGGGDPSGQEPAPAPMDSPIKVFSDLRGGGARGAAIDAGGSARKPVSLWPGMHHSPVTNALWEARSSIFERKMDAGGNADAGPQTDLLTRTPAQSRTSIVYKFAADDILREQYRDPWNEVRVGKLLEDLDALAGTIAVKHCSDGDSTTRPLLLVTASGDKMVLMKPLRLDTEVKIIGAVTYVGRSSIDIQIEVTQVDQDGDVQSDPIALTANFTFVARDSVTGKSAPVNRLSPETEREKQLYAETEAQDKVKKRKREEQKGVLEKGVQKLGAEAERLKALLAEGRVFSDFPALADRDSILMKDTRLETSMICQPQQRNLYGRIFGGFLMHRAFELAFSTAYAFVGQRPCFLEVDHVDFLKPVDVGDFLRFKSCVLFTQLENKWQPLVNVEVVAHVTRPELRKSEISNTFHFTFSVGSDALKNGVNIRNVVPSTEEEARRILNRMDAEGLFD

SEQ ID NO: 10874 - protein, 188 aa, Triticum aestivum
  unsure (1)..(188): unsure at all Xaa locations
  Clone ID: TRIAE-23APR03-C7631_1.p
KKSYSILDSSQIPPPHPYPHPPQRGADVAIPPPPPHRNRGEVTPNLALHADGTRLPHLPALQRLGPRVQDLLIPARHVPLFDYNLDPNDCGRKYVEGSLFVVRRHTQARCSLFVXNRRNNGCSRLRILKRRIRIRLPASLFCCFQNELQAPYLLYRNDAKEVNSFCFYNLQDYGTLTRKCPRIRKGHR

SEQ ID NO: 10875 - protein, 199 aa, Triticum aestivum
  Clone ID: TRIAE-23APR03-C76575_1.p
NESSIAYIHLLDGFLFPDTCMLRVVVVFGLENIQRPTSLLLSHQVSLDTCLLAGVRLFSVAGTPALFFGEASATTDGESFFAEESAADGESLLSWLFFSRRKFAGFAYELVHGHLLEWMVSPSTIVSSSKIFPPSEALLEKYLALMRAASSAWYLFTFCSCSSISGSPTASIAVAGSVLTLSMVPQCAAKRRRNLLEEG

SEQ ID NO: 10876 - protein, 399 aa, Triticum aestivum
  unsure (1)..(399): unsure at all Xaa locations
  Clone ID: TRIAE-23APR03-C7679_1.p
MTQLQPRPLRTLALSRRRGAGAAARPMAGSVRCSAAARSYSITLLPGDGIGPEVVAVAKDVLSVAGSKEGVELRFQEMLMGGAALDAAGVPLPDETLAAARASDAILLGAIGGYKWDNNEKHLKPETGLLNIRAGLGVFANLRPAXTVLPQLEVAEGVDNMVVRELTGGIYFGKPRGFGTNDKGDVTTDNSEEETGFNTEIYSAAEIDRIARVAFEVARKRGGKLCSVDKANVLEASMLWRKRVTAIASEFPDVELXAMQLIRNPNQFDTIVTNNIFGEIILFVASXLYDEASMTAGSIGMLPAAGVGESGPGLFEPHRCPAPDIAGQDKANPLATILSAAMLLKYGLGVESAAKRIEAAVTETLDNGFRTGDIYSAGTTLVGCKRMGEEVLKALESQK

SEQ ID NO: 10877 - protein, 379 aa, Triticum aestivum
  unsure (1)..(379): unsure at all Xaa locations
  Clone ID: TRIAE-23APR03-C76_1.p
MVPPSDAQATPAAPAAAALAAPPARSQSHAEWPAYMQSLGPSGGPTPADPPRERGMAAGASXGATEGPPMQHPTSPAADGLATYGAASIAEADVYRTAEARAHAHWAXSIAAPKVQHHDDEGNLHKKANNNSNGKXRRWQPQTGGVTLGEKTPRGSDRDEXGVPLSNHNHPSSIQGAFSKDDVLVHFSQLTGGPVELPRRRHVPVSAPGRAALPNATPNLNIGIDLWSASQSLAVIPVQGEANPGLALARCDGXFGQLDEREIKRERRKQSNRESARRSRLRKQQECEELSRKVAELTTENNALRTELDQLKKACEDMEAQNARLMSQEPAAVTTTLGMSIAAPKVQQHDDEGKLHKKANNNSNGKYVGGSRKLEANPR

SEQ ID NO: 10878 - protein, 401 aa, Triticum aestivum
  unsure (1)..(401): unsure at all Xaa locations
  Clone ID: TRIAE-23APR03-C770_1.p
LPQTSRSFVPSIRWRSASDGGVARAGGCPLAGVPVAFAPRGVPGSRVPCGGPLLRSVRRRLARPRRRHPPGREPAPWAPPSRAAAGAARRHVLRGALRARHGPLRVARPPASRGVGVPPPRPVAGPVAPRFHGXVPLHVLAFVDRKVDDAVQELGRHLPPAVKSASAKACHAVHAVPELAREIADGARRSGVKGVAKDVYGMVQPVAKGLYVRCEPVAKDLYVRYEPAAEHLAVSAWRSLNGLPVFPQVAHIVVPTAAYWCEKYNRVISFAAGRGFPGARFLPGIPIERIAKAFGPSSAGERSPVAMPTQPDAETPKPRSADVKPTALNGGTSKQRSWDAKPMGPDRPTGRESWSGAKPVRPGARPGEATLPESKPVESDAQASGESQPEAAKTMDLGAQA

SEQ ID NO: 10879 - protein, 558 aa, Triticum aestivum
  unsure (1)..(558): unsure at all Xaa locations
  Clone ID: TRIAE-23APR03-C77422_1.p
TRPPTPPPPRPLSSPAHLRRRSDCICSITACLYSSEHTTPKPAPPPYPNRRRRRRALSCKSSSLFDVSSYAATPLPPMHRLSSSSRLPISFMASAPPRWWPLALARQIIPLLAAPNPPARRLSRFPHGSQNLATVSRVQGDESGKPYKRLPISIAQMMKNMKTDNLKKLKNIGTRGTVSEVIDEDERKSDKDAFRTTSEVMDDKSDTWGQNVNLPGFEEDQSSAAKNHITEIAVSEDEGLSDDEGYSVNGILAKSRHRDGSIYRDMDLYDWKKHYRIADRIETRLEAMTLSDPAANCNVHDGICTRHFARSMLQIYSLELAKIPVDGLVELYGYVAVRDDLDPLLNYVVNISRDDPVIVEQGSLINMXGPKRGIDMADHAXYXEYDMKIKSGEQEKNDLQLIDGASFIGPLGPWDQPCTFHIAGDCGSVDITLSPLLKAVEATVEVLILEVKSSFSLSVGCLASGFNEEIQLFDGTIADSQGLKRSVVAVMKNSSIDLKFKVGALSSSSDQHCCSFKAKMHGHDIEEIKTDFALILVKVIWSTLPRGFSAMCDGLARD

SEQ ID NO: 10880 - protein, 180 aa, Triticum aestivum
  Clone ID: TRIAE-23APR03-C77511_1.p
WSTSSRAARRTSSRRIHGRGAPCSRPSGMRVGTVACPARRQLRRVRVLLLILKLQAEERASIKRSLPLRNGNSETVLRLAPVSYCAWISSIMGLGAFPRTVVASFWTPSSKRPSPTSSLRRRRWSSKSSTRLAPVSYLAWTSSPMVASSFPPSVILVYGAFSATKTFVLTTLVWRGGYNV

SEQ ID NO: 10881 - protein, 479 aa, Triticum aestivum
  Clone ID: TRIAE-23APR03-C7758_1.p
MGDRHLTEQQRFLFVFLRRSTVMGRARGGRLLPVLAALFVALLLISGCAAEGEDEEGSPVPAEEPEAPMEDKEKAALYAAIGSFVGKAWNGSGLFPDPCGQTPIQGVSCDLFNGVWYPTVVSIGPVLDNSLQCAPDARFSPQLFDLRRLKSLTFYACFPAANPTTIPAASWDKLSGTLETLEFRSNPGLSGAIPASLGRLASLRSLVLVDNNLTGAVPSELGGLAKLRRLVLSGNGLSGPVPATLGGLKGLLKMDLSNNRLDGRIPPELAGLESLTLLDLRNNSLTGGLPDFVLAMPALQDLLLSSNPLLGGTLMQRGWEKMASLATLDLSNVGLAGAIPESMAAMPRLRFLALDHNRLSGTVPAKLAALPSIGAMYLNGNNLTGALEFSARFYQRMGSRFASWDNPGLCTAETAGGAPTGVAVCKDAQEPPRVGVRDGMDGGGRRPEASSSLPASSSSSAISAVLWWSVLAQGMAMAL

SEQ ID NO: 10882 - protein, 348 aa, Triticum aestivum
  Clone ID: TRIAE-23APR03-C77697_1.p
MEDAANATQTTSTTSSVAAVAAAAQHQQLQRQLFLMQQAQAQAQAQPHPQAQQLSQQAMSRFPSNIDAHLRPLGPHRFQQPAPSQLQTPPQPHSQGQPHPQPSPQQAAQARVRSPEVEMALQDAMRVCNPDIKTPFHSLEDAVSRLLPYHVVADYEAEEDDRILDSDATGQIPSRLQQWDHNILVKIAEFTTTFEKQVLAYNIMTKKRAIGEFRSEERLMLEQALLQEEKQASMELRAEIESREKAGREAAEAKMRMAMAEHARVEAQAHAEVIGHGPLRANAAASQGDDGPSHDMAQEQVEDGWENTQRDDDDPSEDFLNDENEPENGNSDMQEEWRRSGEFDLNSR

SEQ ID NO: 10883 - protein, 373 aa, Triticum aestivum
  unsure (1)..(373): unsure at all Xaa locations
  Clone ID: TRIAE-23APR03-C77779_1.p
MVNRDKAGCPTAAATLPLDRLLASLAANXAEQLGKRWEIAVRDRRARAAERRMEADAAPPVQLHTPLFYATCALGGGLSTGXLTHLAVTPLDLVKCNMQVDPSKYRDISSGFGVLLQEQGLGGFFKGWMATLVGYSSQGACKFGFYEYFKKCYSDIAGPENADRLKTVIYLAASASAEVIADLALTPTEAVKVRIQTQPGFARCLTDGLPKLVRSEGAFGLYKGTLTLFGIQIAYTMMKFACFETIVEMVYKHAVPKPKDQCSKPLQLAVSFAGGYIAGVLCAAVSHPADNLVSFLNNAKGATVADAITTIGLWGLFTRGLPLRIIMVGTLTGAQWATYDAFKVFVGLPTTGGVSSSCHAATTLHRVDHEKQN

SEQ ID NO: 10884 - protein, 363 aa, Triticum aestivum
  Clone ID: TRIAE-23APR03-C7790_1.p
MNHHLESGDYQKLFCRKMESAELHTPLLHGLPDEIALLCLARVPRQYHNALRCVSRGWKTLLCSEEWHSYRKRNNLDESWIYVICRGTGFKCYVLVPDPTTRCLKVIQVMEPPCSGREGVSIETLDRRLFLMGGCSWLKDATDEVYCYDAASNHWSKAAPMPTARCFFVTAALNNKIYVTGGLGLTDKSPNSWDIYDKATDSWFSHKNPMLTPDIVKFVALDDELVTIHKASWNRMYFAGIYDPVDQSWRGKENEIALCWSGPTVVVDGTLYMLDQSLGTKLMMWINETKEWVMVGRLSDKLTRPPCELVAIGRKIYVIGKGLSTVTIDMDMAARVDGFLVSSSTGPLMEHDFSPEKCSVITI

SEQ ID NO: 10885 - protein, 637 aa, Triticum aestivum
  unsure (1)..(637): unsure at all Xaa locations
  Clone ID: TRIAE-23APR03-C77_29.p
TREKRRRRKNSIDSAPSELSDLGKKIYPSLAPVVFLLRPPPSHLHPSHNPPASSPLIPLHSAPGAPAASGRRKVPLLPPVKMMRCAVRGGGAHVVIGERRSPSSSSPGSGRSVVRMSEGRGGLCCGGVRSRAADLAGLEMGRPSAGAAGLFRSTRYGRVRATASADPEDIPSDKLQAKSSGSVLPYVGVACLGAILFGYHLGVVNGALEYLSKDLGIAENAVLQGWVVSTTLAGATVGSFTGGALADKLGRTRTFILDAIPLAVCAFLSATSQDVRTMIIGRLLAGIGIGISSALVPLYISEISPTEIRGALGTINQLFICIGILAALVAXLPLAQNPAWWRTMFGISVVPSILLALGMAVSPESPRWLFQQGKISQAEAAIKKLYGKEKVTEVMYDLKASGQGSNEPDASWFDLFSKRYWKIVSVGAALFLLQQLAGINAVXVYYSTSVFRSAGIASDVAASALVGAANVFGTMIASSLMDKQGRKSLLITSFSGMAASMLLLSLSFTWKALAPYSGTLAVVGTVLYVLSFALGAGPVPALLLPEIFASRIRAKAVALSMGMHWVSNFFIGLYFLSVVNKFGISTVYLGFASVCALAVLYIAGNVVETKGRSLEEIERELSPPNKADANAFLVSDQ

SEQ ID NO: 10886 - protein, 402 aa, Triticum aestivum
  unsure (1)..(402): unsure at all Xaa locations
  Clone ID: TRIAE-23APR03-C77_30.p
MPALGTLSAGGAAAGVAGLLRLRRGPALASPLPAAARAGAVHDAGQLVWGRQLRPALVLPAGXLPXQASKRLTLRPPAASAEPAGEAKXPGLLEKYPAITTGFFFFMWYFLNVIFNILNKKIYNYFPYPYFVSVIHLLVGVVYCLLSWAVGLPKRAPINATLLKLLFPVALCHALGHVTSNVSFATVAVSFAHTIKALEPFFNAAATQFVLGQTVPLSLWLSLAPVVLGVSMASLTELSFSWKGFINAMISNISFTYRSIYSKKAMTDMDSTNVYAYISIIALVVCIPPALIIEGPQLMQYGLNDAIAKVGMTKFVSDLFLVGLFYHLYNQIATNTLERVAPLTHAVGNVLKRVFVIGFSIIIFGNKITTQTGIGTCIAIAGVALYSYIKAKIEEEKRAKAA

SEQ ID NO: 10887 - protein, 426 aa, Triticum aestivum
  unsure (1)..(426): unsure at all Xaa locations
  Clone ID: TRIAE-23APR03-C77_36.p
MKMAGSAVLLISLLSAIAPXPSEALNVGGHLLXSKTFRSPPILLGPGSVSNKYYHDVDFPRGHLAVKSFNAEVVDEEWRPCPAXHQTYLHHLGLQYHTMLSRTTRALMAQKVPGNALKGNXGVCKRALTQYFGLGSETRHTATWVPDPYGIETGNQEKAPEGYEEKWLLNIHAIDTRGVADKPSCTECKCDFYNVTIDEYGRTVSKNYTGGLLCCYDQTQCRLKAGFNAEVRXVFLQYTVTWLDWTDAVVPVKIYIFDVTDTAMLDGTHEHSCKVEYQVEECSAENRANNECIHTKTTRAVLPRGGDIVYSVAHQHSGGVGASLHGQDGRLLCESLPTYGTGKEAGNEANYIVGMSSCYPKPGSIKVSNGEVLTIVSNYSSDREHTGVMGLVYILVAEPQQPAPAPSLCFSFPAPWCLPAWMSSNM

SEQ ID NO: 10888 - protein, 368 aa, Triticum aestivum
  unsure (1)..(368): unsure at all Xaa locations
  Clone ID: TRIAE-23APR03-C7800_1.p
MWRSILLVVVVALALAPAPALGIPFTEKDLASEENLRGLYERWRSHYTVSRRGLGADAEERRFNVFKENARYVHEGNKKDRPFRLALNKFADMTTDEFRRTYAGSRVRHHLSLSGGRRGDGCLRYDDADNLPPAVXDWRQKGRGSPPSRSQGQXCGSCWAFSTIVAVEGINKIRTGKLVSLSEQELMDCDNVNNQGCDGGLMDYAFXQFIHKNGITTESNYPYQGEQGSCDLAKEKAHAVTIDGYEDVPANDESALQKAVAGQPVSVAIDASGNDFQFYSEGVFTGECSTDLDHGVAAVGYGTTRDGTKYWIVKNSWGEDWGEKGYIRMQRGVSQAEGQCGIAMQASYPTKSAPRARAVREGSHTDEL

SEQ ID NO: 10889 - protein, 521 aa, Triticum aestivum
  Clone ID: TRIAE-23APR03-C7814_1.p
MWAWGLAERAIAGLLGPAGANGGRWNTAVAVGVTAAAGIALVAIVVSSRRGGIKSPWRRRRKRALGPKEWRSLFTPEGKFYDGGVKLLKRVRNGGVEPSIRAEVWPFLLGVYSLNSSEAEREAIKAHNRKGYLLLRKHCLRKNNKESVDDHITSEEENPCVISEQEMQDKTGKAIPENQADESLCSSSSRDEDESEKSDVTDVEASRDDVASVDQSSVEDEEESMPLPKYSNTGGNIETETKLSKVARPVKSARTVEDFETWQRIIRLDAVRANNEWVSYSPSQAAVTREKAIESASSVCLKDYEHLEAHRIHHASRLVAILEAYATYDPEIGYCQGMSDLLAPLLAVLEEDDEAFWCFAGFMRKARHNFRLDEVGIRRQLNMVSKIIKTKDFHLYVRLEMLEAADCFFVYRMVVVMFRRELTFEQTLSLWEAMWADQAARRAGITRSSWRKLQLGAPPTDDLLLYAIAASVLEKRKLIIESYSSMDEIIRDCNSMAGQLDIWKLLDDAHDLVVTVQDRIE

SEQ ID NO: 10890 - protein, 346 aa, Triticum aestivum
  unsure (1)..(346): unsure at all Xaa locations
  Clone ID: TRIAE-23APR03-C7856_1.p
MHAIHGHGYFGDEHETWNYSYAQQRFAQAQMRPQQASQQAALSPQKGVAQGLSRTASITGLNSQLPGVSQNGQMMQMSPSQQQQQWLKQMQSSLASPSQHQIQQQHRMLLMQQLQKGLTPHQIAQAQQQHSPHLNAQQLMQQQHIMQQLQQQQQQQSLQHLAXQKSANLTGSQPGTPLSGGTMAGGSGSXGAENYLLGKRKIQDLVAQVDPLGKLDPEVEDLVLEIADDFIEXVTAFACTLAKHRKSSVLEAKDVLLHLQRNWHLTVPGFSKEDKNPQRNYVKAVVDPQQPECDAAGVRSASNKLVANNSIANHQTRGPVADPYQICGSSQKFPVSELCVPLGGRL

SEQ ID NO: 10891 - protein, 615 aa, Triticum aestivum
  unsure (1)..(615): unsure at all Xaa locations
  Clone ID: TRIAE-23APR03-C785_1.p
MGGGSGGRGKGMPRAMAPVEEVDVAAVRYKPAELQAPHLTGFPLRAFVWLLESPLLGPLVTSILKKQNNMTQMLQHTVIPERPMFYPEYPPQEPERGVVTLGDDRDPVDRVEEALSCLAPYDPSGRFTSADENNPFLGRTLRDIMXLSTPEEKDDVLSQGSFQEGWRHSNPXQPALLLLVYHQALGLGRLADASPLSCDNAWLRGIFLAFXHNCSCWXMTMQGLPIGLQLIGRPWGEASLLRVASAVEEHLPEEKESSVHILGHPKGPEASSVCNINSMXRSVDSYTGGSSSGPAALVSSGLCSGAIGTDGGGSVRIPSSLCGIVGLKTTFGRTDMTGVVCDAGTVEVASPLTSSVEDSVLLYSALAGSRPMDKLTLRPSPLCVPNLVSSENSKILQSVKVGKYTEWFHDVPDNEVSNTCEDALNLLCSTFGCQIEEIILPELEEMRTAHLVSIGSEAFSDMNAHYQAGRRTEMTLDTRASLALFKSFTSADYVAAQCLRRRIMYYHMEAFKKVDVIATPTTGMTAPKIPPSALKGESDYVVSAKLMQFIFAGNLLGLPAISVPVGHDKQGLPIGLQLIGRPWGEASLLRVASAVEELCLKRRSRPSTFYDILKT

SEQ ID NO: 10892 - protein, 112 aa, Triticum aestivum
  Clone ID: TRIAE-23APR03-C78672_1.p
MATRRNIPYSVLPTEDRDEDNVDRRFTYTPKSLRRIPWKSIALALFLLFLGSSLLFLSYFISTGHMEGDSSQVYGLLFLGILAFLPGFYETRVAYYSWRGAPGFTFAAIPDY

SEQ ID NO: 10893 - protein, 202 aa, Triticum aestivum
  unsure (1)..(202): unsure at all Xaa locations
  Clone ID: TRIAE-23APR03-C7877_2.p
MAAAAGDGGSVPPKTPIAESPPASRPHVTRNAMPWEKCVAGVQLALKDPKVVFLREQIEKAGCTVWPTLFRAAICRSGGNYASGMGVVVCCNHMRRQDEITQVIIHELVHAYDDCVVKNIDWKNCADHACSEIRANHLSGDCHYKRELMKGFLKIKGHEPDCVKRRALLSCQGEPALFQKXAKPAIEEVWGNVVKTNPPPVG

SEQ ID NO: 10894 - protein, 534 aa, Triticum aestivum
  unsure (1)..(534): unsure at all Xaa locations
  Clone ID: TRIAE-23APR03-C7896_1.p
MPASAAPEKAAGSGGELLYCGATNFDXINQKPAGGMQGNLVSXPTRLRSLMGVDIASVAXSGCTAXIVLLWVLMGVTIHGVAMRRGSWDMRHTLQRKLATVDLXTIKIIKVIKASVWKKIIHVVVTDDGKSFAFGHNKFGQLGTGSLKNEIEASPVPCLVTEVTGVACGGDFTVWLSSVEGSTILSAGLPQYGQLGHGTDNEYNTKDSSVKLSYDPQPRPRAIAALSEKTIVKVACGTNHTVAVDSSGFVYTWGYGGYGRLGHREQKDEWQPRLVEIFQRHNVLPPNAILSAGSANCACTAGGGQLYMWGKMKTTGDDTMYPKPLMDLSGWNIRCMASGTMHHVVGADDSCISWGNAQYGELGYGPMGQKSSANPKKVDSLEGMHVTGVGCGFGLSLIIVDRAKAGDKLDQLDIYDGDASTPVEETVEPKVTKKAPASANSKSNKRKKTKDLSESEEEDEDDDDSEDEENGDARGAKGKRGRKPSGRGRGRGAKKATPEPKSSGRGRGRPKKTETPAESSGRGGKRGRGRPRKS

SEQ ID NO: 10895 - protein, 631 aa, Triticum aestivum
  unsure (1)..(631): unsure at all Xaa locations
  Clone ID: TRIAE-23APR03-C7941_1.p
QVHKWRLSSGRCSRDLSWVGSLEIVHCPDGLHGIGALLASRKSKAGNATYLLNSRHEPFSFPRCHSPRTSRLNWTRNLWPHKMDILLKKXHGFKVLDAGSYQTVAMDLAKTLQWEDIICVRYCRPSEVRCPICLESPLCPQITSCGHIYCFPCILHYLLXGVKRITEVSGWKKCPLCFMMISAKGLTTIFVTQLQHFHIGDNVTFALLGRPKNSLTPFLRNSSSEYSSLVDHPSDVFSKFILTSDVELSVRGAKSDLSNWLQMADLGLVDDLEKLPYVSAALEQLEERMKYWSEFRYYSSSPPLKNSSSPISSNKLKNSDNPKTSHTNSGHKLSPLSDGDIITGVSGLSVSPLYINSKKGVPQKMEERRAVAVDSNEQDSYTFYQVIDGQHLILHPLNMKCLLNHFGNSDMLPPRVTGKILELETITQSEASRKRYRFLSHFSLTTTFQFCEIDLSDMLPPISLAPFMDEIKRREKQRMQTAKKEEKDRVKAEVAAAAQESAMRFEYTNFSRTQSDVMFSLDDFEALGNNAAGPSTSPPAGERKLFSDVTRLGFASAQDSPPLRAETGDANNEITRDQGPVSASSVSFASILSSTRAAADSSVETPKPNGVGKAGKKRTKVLLSTGGGRRY

SEQ ID NO: 10896 - protein, 358 aa, Triticum aestivum
  Clone ID: TRIAE-23APR03-C7962_1.p
ANGDHSSRHAPLPIPSPYPFPSLLSKTLNPTSTSKLSPAHSLSLSLLTTPAPLLLPRRQGRRQRDISAAYGDGDMDDDFGDAGDFDLDGDDGVGDDDDLDNEQDYDVDYDRLLAPVKPRPQLSGVGSGGEEGEGDIAMVAAESFVSTGASASDTVVDYTVDEDEFHKIRLLHCDFFIRKVPDPDQDVYDFREMYVTPPDTDIYSIPRVLAPMPQKYVRCVKKNFGRYHVSEPPVEHLRDPLYKTEREIMKVFLTKHYRNRRFSDTDFFLDFEEIYVIDSKTRSITRAKVVVNVPEGKRRDRRNDLLLIRDGGESFRITDKSQRDDASTIIQREEWTKSRQDVEKHFRKLRDFDYSNWF

SEQ ID NO: 10897 - protein, 152 aa, Triticum aestivum
  Clone ID: TRIAE-23APR03-C7969_1.p
TPVADDVCHIPKGQGACSHREPVEAAAEEPPLTGYTNPRESEHLGYNPVAKEANVHAMMGGHNETRQFDPDQPPEYDEWPFEIVEGDVVPTAHLWPAHPTPIAAVAQGSPVMLRQQFAMVQVGTPTKLPMPPKCTISPNTPRSGSCYRCHEV

SEQ ID NO: 10898 - protein, 318 aa, Triticum aestivum
  unsure (1)..(318): unsure at all Xaa locations
  Clone ID: TRIAE-23APR03-C796_1.p
MGSMAAEMTAVEEEACIYAMQLSSTAVLPLTLKNAIELGMLEVLMGAGGKMLSPSEVAARLPPTTTNPDAPAMVDRMLHLLASYKVVSCEVEEGTHARRYGPTPVCKWFTPNQDGISMAPLLLLTNDKVPMESLYHLKDAVLDGGLPFHKAXGIPTNEYTQEPARPQHMLRECSSKYPHIKGINFDLAHVIAEAPHSPGVEHVAGDMFKNVPSGDAIVLKWILHNWTDEHCTTLLRNCYNALPAHGKVVVVEGILPVEPEATSRGQQASLSDMIMLTHTAGGKERNQREFEQLAKAAGFTGVKTAYIYSNTWVIELTK

SEQ ID NO: 10899 - protein, 197 aa, Triticum aestivum
  Clone ID: TRIAE-23APR03-C7970_1.p
MASAAPFSGTGSLLRLTKPGTPQPQFFSPPPSRSHFHLRTRPAKAKSPIAGAIASSSMAAAQPQTCDGQQQRAEEAMKLLFVEMGVGYDQHGQDITSAAVRACKDAISSNSIPAFRRGSIPGVNSEQMKLQIKLGVPRPVQHLLDFERIKAVFPYGEITSCEVIDGGMICSSGTCIEAMGDKNDDCYIVNAAVYVGY

SEQ ID NO: 10900 - protein, 343 aa, Triticum aestivum
  Clone ID: TRIAE-23APR03-C79_1.p
MSPQPTLATTTTPATGPNPSYYQTAPVSQESIQRTEVLLHLYAYQHTQGKPNANQTVIVDPKLPACFGALAANDWTIYDGTCTNANLVAHAQGLHIGAGMTKENWFICFNMVFVDRRFMGSSFKVMGDFRGNEGEWAIVGGTGEFAYAQGVITFNKTWSAQANVRELHVRALCLSFSKAPETPCSRTPRQSSVTKIGPWGKISGEFLDVPTTPQRLECVTIRHGVVIDSLAFSFVDQAGGQHNVGPWGGPCGDNKDTIKLGPSEIVTEVSGTIGVFGAANVEYNAITSLTITTNVRTYGPFGEPQCTRFSVPVQDKSSIVGFFVCARKYVEALGVYVCPPISN

SEQ ID NO: 10901 - protein, 335 aa, Triticum aestivum
  Clone ID: TRIAE-23APR03-C802_1.p
MAASCRRASQMLGPAASRLLHSRGYAAAAAAPSPAVFVDKSTRVICQGITGKNGTFHTEQAIEYGTNMVGGVTPKKGGTEHLGLPVFNSVAEAKAETKANASVIYVPPPFAAAAIMEALEAELDLVVCITEGILFETLPQHDMVKVKAALNRQSKTRLIGPNCPGIIKPGECKIGIMPGYIHKPGRIGIVSRSGTLTYEAVFQTTAVGLGQSTCVGMGGDPFNGTNFVDCLEKFVDDPQTEGIVLIGEIGGTAEEDAAAFIQESKTEKPVVAFIAGLTAPPGRRMGHAGAIVSGGKGTAQDKIKALRDAGVTVVESPAKIGSTMFELFKQRGMVE

SEQ ID NO: 10902 - protein, 175 aa, Triticum aestivum
  Clone ID: TRIAE-23APR03-C803_4.p
MASSTALSCLAALLLLAAAAAPASAAEETRLRVYWHDVVSGGPNARVVQVAQAPSSNASATGFGTVLVIDDPLTEGPNLTSRLLGRAQGMYISAGKDSLSLLMAMNFVFVDGAYNGSSIAIIGPNQADRAVREMPVVGGTGVFRFARGYCQLRTHWFDAKTGDATVEYKIHLRHD

SEQ ID NO: 10903 - protein, 401 aa, Triticum aestivum
  Clone ID: TRIAE-23APR03-C8048_1.p
MSPNIITEAGVSTRLNQWWSSTPFITSGVTIICAAIYLVCLLVGYDSYAEICFLPSAVASHFQVYRFYTSVLFHGSLLHVLFNMLTFVPLGTELERIMGSVRLLFLMFLLATTNAIFHLIVAFLVDYNPLYHVSYLVDECSIGFSGVRFSMIVIGMSLSGVQYRSVFGLFNVPAKWYAWILLILFQFLASNVSLLGHLSGILSGFAYTYGLFNYLLPGPSFYSSIEGLSMLSVCVRRPGFILCTGGTTYGQLPTHSNMSTPPSALINANFLRNISSWMPSRRTSTVQTSTNQEQEDPRFPGRGRTLASTGTEPTAREANANLHARLLDNSTPSELLTNSQHTAANTVRADATVTADQTDTFDEELKKLVGMGFERTQAEVALAAADGDPNVAIEILMSQQD

SEQ ID NO: 10904 - protein, 219 aa, Triticum aestivum
  Clone ID: TRIAE-23APR03-C80497_1.p
MSADELRLDLEELLRLEGLAKRPRVVSLLSNEIRSVDAKLASRAAPVPVPTPAPQAVAVAAAAPAGLSYVTLGSFSWDQDNEKIRVYVFLENVDQEKVETTFKPMSADIKFHDVKGKNYRCAIPKLNKEIVPEKCKVVVKPTKIVITLWKASSGNWLDLHYKEDKFKPSMDKEKDPMSGIMDLMKGMYEEGDEDMKRPIAKAWSDARSGKTADPMKGLP

SEQ ID NO: 10905 - protein, 192 aa, Triticum aestivum
  Clone ID: TRIAE-23APR03-C8066_1.p
MSSRRENGSEGDGLGAEGGVPPSPLYAAPVVCLLRSAGDFGAGAFVGGVVGYGQGLITKKGFKGSLSNAGSAAKTFAVLSGVQSFIVCLLKKLRGKDDLVNSGIAGCCTGLALSFPGTPQALIQSCATFAAFSCIMEGLNKQQAAMAHTLGGNALTFGHGKGGVLPPFTLPPILDASDALASCCQTLVKPKH

SEQ ID NO: 10906 - protein, 492 aa, Triticum aestivum
  Clone ID: TRIAE-23APR03-C8110_2.p
MGSMATSVEEIGAAVAPQAVERRLGELRATFESGRTRPLSWRQSQLRGLLRLLADKEEEAFRALHDDLGKHRAEAYRDEVGVLTKSANAALREIGKWAAPEKVWVPLVAFPASAQVVPEPLGVVLIFSCWNFPLGLSLEPLIGAIAAGNAVALKPSELAPATARFLEENIGEYLDATAVKVIQGGPAVGEQLMEHRWDKVLFTGCPRVARVVMAAAAKHLTPVALELGGKCPCIFDAVAGRRNLQTSVNRVIFAKWSSCAGQACIAIDYVLVEERFAPTLIKVLKSTLKRFIADSDQMARIVNGRHFQRLSNLLKDPAVAASVLHGGGLDAKNLSIEPTILLNPPLDSAIMTEEIFGPLLPIITVKKIEDSIAFVRARPKPLAVYAFTDSAPLKRRIVEETSSGSVTFNDAVVQFGVDTLPFGGVGQSGFGQYHGKYSFEMFSHKKAVLRRGFLVEAMLRYPPWDEQKIAMMRHLFRYDYVRFIFTFLGLRR

SEQ ID NO: 10907 - protein, 255 aa, Triticum aestivum
  Clone ID: TRIAE-23APR03-C81190_1.p
VLMSMEVLHDTTGKKEAVVYYMDAPLPYAIEENFGGCFFEDDVDLAQVLQDQEIVYQLIQGNDGSGLSRTHSDPGSSCGHPQKSSGRRLTRGANYESQLAVDEALARDLQAMEDQIARATIDDKKRKEGRKPVSSSTSNNGNTSVSRSSQVLTKDEVDPDNMTYEELQQLGETIGTESKGLPEDVIALLKSSTYKVGIFSRKEKHDECVICCMAYKNRDKLTTLPCQHQYHRTCVAKWLKINKVCPVCNKEVFGS

SEQ ID NO: 10908 - protein, 617 aa, Triticum aestivum
  Clone ID: TRIAE-23APR03-C8180_1.p
MSGAALCAALTELGFDGEDPLDADALEWPFQYEEARPLLAWICSCLRPSNVLSPSHLSQYEQLVEEGRLLEGEDLDSAFDSISAFSSKKDNQEAVFEAEETILDIREAKLAYRAEVFELQRQLARQQAQFDMLAGQASSLIQGRRARVSAMSAVSVQLISLDEILSSRNLEMNAVLGRITATTQELAHYHSGDEDSIYLAYSDFHPYVIGDLACTKELNRWFSKQFEKGPFRLVAEEGKSKCSWVSLDDITNGLTRGDSEKSHHHQRVTELQRLRSIFATSERQWIEAQVENAKQQAILQILKSQVSSDEAHIHRDIHSLRRKSSELAGEFSTLTQKVQPFISETIPCLCSELAQLQGTYILQGDYDLKVMRQEYYINRQKTFINHLVNQLARHQFLKIACQLERKHIASAHALLRVIESELHSYLSAVNARLGHCNSLIQAASEVREQGAIDDRDTFLHAVRDLLCIHSNSQAAVPTYMSAHALVQQISALQSDLLSLQSELETTLPADRKRCINELCTLIQTVEQLLFASSTTAEPVLTPWPLMRALDDMENANAQVEVAVEEVTKARTQKIKIFENRAHEVGRERQVFVDFFSNHERLKNQVRELTSRVKALQE

SEQ ID NO: 10909 - protein, 410 aa, Triticum aestivum
  Clone ID: TRIAE-23APR03-C81858_1.p
RLRSFEPLRFLVTISLQDYANVKSNYWLGLGDSIGLLHHSRTCTLPSSACPLSGQLPFFCFTPQGDCDQYCALIPGLPEDLAKICLALVPRTHFPVMGGVSKRWMSFLESKELIAVRKEVQKLDECVYVLTADAQAKGSHWEVLGCQGQKNTPLPLMPGPTKAGFGVVVLDGKLIVIAGYAADHGKECVSDEVYQYDCFLNRWTALSKMNVARCDFACAEVNGVIYVAGGFGPSGDSLSSVEVYDPEQNKWTLIGGLRRPRWGCFGCSFEGKMYVMGGRSSFTIGNSRFIDVYDTNSHAWGEFRNGCVMVTAHAVLGEKLFCIEWKNQRSLAIFDPADNSWQKVPVPLTGSSSTRFSLGTHDGKLLLFSLEEEPGYQTLMYDPAAPKGSEWCTSKLRPSGLCLCTVTIKA

SEQ ID NO: 10910 - protein, 304 aa, Triticum aestivum
  unsure (1)..(304): unsure at all Xaa locations
  Clone ID: TRIAE-23APR03-C82071_1.p
MSSPHGGLDDQIERLMQCKPLPEAEVRALCEKAKEILMEESNVQPVRSPVTICGDIHGQFHDLAELFRIGGKCPDTNYLFMGDYVDRGYYSVETVTLLVSLKVRYPQRITILRGNHESRQITQVYGFYDECLRKYGNATVWKXLFDYFPLTALVESEIFCLHGGLSPSIETLDNIRNFDRTQEVPHEGPMCDLLWSDPDDRCGWGISPRGAGYTFGQDISEQFNHTNNLRLIARAHQLVMEGFNWAHEQKVVTIFSAPNYCYRCGNMASILEVDDCREHTFIQFEPAPRRGEPDVTRRTPDYFL

SEQ ID NO: 10911 - protein, 393 aa, Triticum aestivum
  unsure (1)..(393): unsure at all Xaa locations
  Clone ID: TRIAE-23APR03-C8208_1.p
MPSDSEPPSLSVPTRSPVNISRRQPQPQHPNLPLQQSSVRPSSPSAPRPRGDAMQGLHRRYRWIKEWVPQDLVIAGGPCALYKWVREDRLAALKSKDKEEGACTAKPDPATEVLFLCSYDGCGKTFVDAGALRKHAHVHGERQYVCHYEGCGKKFLDSSKLKRHFLIHTGEKNFVCPHEGCGKAFSLDFNLKAHMKTHFADNYHMCPYPECGRRFTQESKLRAHFRAQHEKNPGGPVMNXNALGDHPHNTAKSLVTPPVPSADRPYVCPYDGCAKAYIHEYKLNLHLKKEHPNHYSDAGAQAGPSRGTVSKNSRRSKPNLTTSMPLAKISKRSGYTVPSPAVSIPEEHQWPRKVLYEDDSEETEEEGDNLEEGGLRYRAASDGDDDEETEEEE

SEQ ID NO: 10912 - protein, 421 aa, Triticum aestivum
  Clone ID: TRIAE-23APR03-C82473_1.p
MASHETDPSPAAPSKKKKRHSKKRKAIEVTVDASFPGAAAPVVGYFPTGYDPLAAAEPPRARLFRHEKHHNRVELVVRAPGGGPDFVGRSYAGEAAAPQLCGYALGVLDKATSTLKIVPIASNKILRLEPHFEVQQPAHSQQSAAEAGSSVADTELNRQDLTQAYGTKKDKDKDNKWKSLKEQRNDPSAYLDLDLGESKTTADATDSQASMEVRNIPPYDPAADTSEKAYLFDEIIPKNIRPHLLDIVGHFESGEFGLKGYGSFVSNRVNKLQELQGEDQERLAWILSYITHLLSLLARNSSMSKQKRKEKDQTIRGPMIPQAVHRKLLLMFTEPGSSSLSTEKHELLINYILVLTLFADDFRSEPTDICADLKMNRQMLKPYYDQLGCKSVSTGAFKPVFMTLPAPLKFPQQVTRRRRRK

SEQ ID NO: 10913 - protein, 284 aa, Triticum aestivum
  unsure (1)..(284): unsure at all Xaa locations
  Clone ID: TRIAE-23APR03-C825_1.p
MGVEGCCNKKVMEEEALVKKITGLAAAIGELPSLSPSPAVNALFTELVTSCIPASTVDVDALGPEAQEMRARLIRLCADAARRLXAHHSDLPVLRTTRPINILHDXNPRPIHTCMVXFPCRQRMDRCAYLFTTIIISPLPAYGWLGFFLFNLTCAAPVSASPTHPPHASGFNIEEEDDMCRVVXVVRSSRVELPACCCNXVILTLYMTEVIITNARSATPXAAVEKARLVEHLGRHMAPGAALVVRSAHGARGFLYPVXVHPEEIRPTAGCEVLHRRNTRQDRG

SEQ ID NO: 10914 - protein, 237 aa, Triticum aestivum
  Clone ID: TRIAE-23APR03-C82600_1.p
MVVKEFTVDLNQPLVFQVGHLEEHYQEWVHQPIVSKEGPRFFANDTMEFLTRTKWWAVPVIWLPVVCWLFAKSIRMGHTIQEVILMALFGVFVWTFIEYALHRFLFHIETKSYWSNTAHYLIHGCHHKHPMDSLRLVFPPAGAAIICVPFWNVVAFFASPSTTPALFAGGLLGYVMYDCTHYYLHHGQPSKDPAKHLKRYHLSHHFRIQDKGFGITSSLWDAVFGTLPSSNIVAKLS

SEQ ID NO: 10915 - protein, 361 aa, Triticum aestivum
  Clone ID: TRIAE-23APR03-C82864_1.p
MAGRLVLSVVVTLLAAAGAAAAESSCPATPPDAGPMLQVSHAFGPCSPLGNAAAAPSWAGFLADQSSRDASRLLYLDSLAVAGRAYAPIASGRQLLQTPTYVVRARLGTPPQQLLLAVDTSNDAAWIPCSGCAGCPTTTPFKPAASTSYRAVPCGSPACSRAPNPSCSLNTKSCGFSLTYADSSLEAALSQDSLAVANDVVKSYTFGCLQKATGTAAPPQGLLGLGRGPLSFLSQTKDMYEGTFSYCLPSFKSLNFSGTLRLGRKGQPLRIKTTPLLVNPHRSSLYYVGMTGIRVGKKVVPIPPSALAFDPATGAGTVLDSGTMFTRLVAPAYVAVRDEVRHRIRGANGRVGFAREQCTAA

SEQ ID NO: 10916 - protein, 111 aa, Triticum aestivum
  Clone ID: TRIAE-23APR03-C8288_2.p
MQQRSVCYLRDMAGSRKALALTVLLVVALAATAQAVCDMDNDDFMACQPAAAATTDPQPAPSEACCATLGKADLRCLCSYKNSPWLSLYNIDPKRAMELPAKCGLTTPPDC

SEQ ID NO: 10917 - protein, 361 aa, Triticum aestivum
  Clone ID: TRIAE-23APR03-C83095_1.p
MGTSAGEGTDLWKQIDDAECYLVSGSFDQAVLTALSVSDQIRAANRERVCEDDELLEMLELVGIVLVQALKELRRTTEMFVQLKAMYGSVASIPVKVFLTGATMLMAEGSGPDLRPIFEDFLAKWRYTDDQVYVLNGEQERSSNGLIVTSTMATEEYLEVVEFYTVTFLSIASGEPENAISWVEKAELIEQDRQELLEKLYALQAAANEKSSTARGAKQSAERNFPASDKGPTPATHEDGPTSATRAPNVKTNGLPKSIEPSLQRVANNFDPMFWWFHSVRVKFGRMHIVLPSGKLMLLFSLLFSTVYVLRRKGAGLKRVVLQHASSLRRAFLDALQLAFSVQMNPLAAVQQTPQAPRGSW

SEQ ID NO: 10918 - protein, 554 aa, Triticum aestivum
  unsure (1)..(554): unsure at all Xaa locations
  Clone ID: TRIAE-23APR03-C8313_1.p
MSLAGSALEAALQAVGRGLDAAGDHRLLYCKGAGRLVTLDEARARDLPIGGGVLCGVPPDVEVEAYRGNPERSRPPPPGAAPDEPFVCSFDKMAEHFNRKASLLETVPLGSFNSLFSFTGSWKNDAAATKALAVDGYSVPLYRVKITSDELILQESVKRAIPYTWDPPALARSXSFIENYGTHIITSVMVGGKDEVYIKQHSSQLSEMEFRNYVREIGNERFSDVENKSNAPPINYSEKDMTVIFRRRGGCDLVQNSVEWIKTVSSAPDVIGMTFLPIVSLVDDIPGKKHIARAIDLYLTYKPPIEELQYFLDFQVPLVWAPVPLGIAGQNRKEPVCPSLQFSLMGPKLFVSTEQVSVGRRPITGLRLCLEGTKQNRLAIHLQHLGSLPKIFLPHWDSHITIGPPKWQGPEEQDSRWFEPIKWKNFAHVSTAPIEYTETNITDLSGVYIVTGAQLGVWDFGAKSVLHLKLLFSRVPGCTIRRSVWDHSPSSAMHRTDEASSSSSDNAKLVKIVDMTETLKGPQDAPGHWLVTGAKLGVEKGRIIVRAKYSLLNY

SEQ ID NO: 10919 - protein, 406 aa, Triticum aestivum
  Clone ID: TRIAE-23APR03-C8326_1.p
PSQFFLYSGSHFGPCLKQQLVTADLTSIIIQLISTAGSMLPSMKTPLLSSNPAVRQLNTPGSPMGFGSIVNQRPSTIREEVVNDISKTSDYEELMNTLNTAHDEKDDLIKCPNPCVGEGPEPVPMEDHDVKESDDGGEAEHLPPGSYVVLQLEKEEILAPHTHFCVICGKGFKRDANLRMHMRGHGDEYKTPAALAKPMRDSGSDPTPVTRYSCPYVGCKRNKEHRKFQPLKTILCVKNHYKRSHCDKRYTCSRCNTKKFSVIADLKTHEKHCGRDKWLCSCGTTFSRKDKLFGHVALFQGHTPALPMDDIKASGALEQPQGSQAMDDMVASTGYNFPGSTSDGIPNLDMKVADDTRGYFSPLNFDPCFGALDDFARPGFDISENPFSFLPSGPGSCSFGQLSGDS

SEQ ID NO: 10920 - protein, 159 aa, Triticum aestivum
  unsure (1)..(159): unsure at all Xaa locations
  Clone ID: TRIAE-23APR03-C832_1.p
VIDRIKVALETACPGTVSCADILALAARDPTVXVGGPYWDVPLGRRDSLGAXASRGSNNDIPAPNNHPYXTIITKFNRLGLNVVDVVALSGGHTIGLSRCTSFRQRLYNQSGQRPGTQPTXHVSYAAQLREGWPRSGRRTTISSHFYLVSSTSSTKFDN

SEQ ID NO: 10921 - protein, 349 aa, Triticum aestivum
  unsure (1)..(349): unsure at all Xaa locations
  Clone ID: TRIAE-23APR03-C83384_1.p
HRRQDDETQLVSEGCNTKRKHGEHKDIMGEVTRTHGAIQLLXKSISTLQMELAAKRSTLELVRSGVPVTSETSQSRKKAFVVVGVNTAFSSRKRRDSVRETWMPQGEKLLQLEEQKGIVIRFTIGHSATSNSILDKAIDAEDAQHHDFLRLDHVEGYHELSAKTKIFFSTSVGIWDADFXYVKVDDDVHVNLGMLATTLARHKAKPRTYIGCMKSGPVLADKNLKYHEPEAWKFGEDGNKYFRHATGQIYAISKDLATYISINQPILHKYANEDVSLGSWFIGLEVNHIDERNMCCGTPPDCEWKGQAGNICVASFDWSCSGICKSVERLKDVHARCGEGDSSVWSDLI

SEQ ID NO: 10922 - protein, 316 aa, Triticum aestivum
  Clone ID: TRIAE-23APR03-C8352_1.p
MAVHLLLRRWGSLVGLPSNPLRGLLLVSAGAAGWRQASSGRRPGDAVAELRGAREDVKQLLKEKSCHPILVRLGWHDAGTYDKNISEWPQCGGANGSLRFEIELKHAANAGLVNALKLIQAIKDKYAGVTYADLFQLASATAVEEAGGPKIPMIYGRVDVSAPDQCPPEGRLPAAGPPSPAEHLREVFYRMGLNDKEIVALSGAHTLGRSRPERSGWGKPETKYTKNGPGAPGGQSWTSQWLKFDNSYFKDVKERRDEDLLVLPTDAVLFEDSSFKIYAEKYAEDQDTFFEDYAEAHAKLSNLGSKFDPPKGVSLD

SEQ ID NO: 10923 - protein, 194 aa, Triticum aestivum
  Clone ID: TRIAE-23APR03-C8377_1.p
MLLPPQKVLPGTEGKAKKKSGWSSDDSDGCCSADSSDGPLCKQGGHVDYPERPGRPEYHHPKQSKDKEEVNYPERPGKPDCPFYMRFGDCKFASACNYHHPKDKYPAGRPDEPECPFLMKRGYCKLRAQCKFYHPEASNPTMQSPTDAKRSVTTDEHHPSTRITLQDYMLPQQPQYPERPGQPECRYYLQRPAV

SEQ ID NO: 10924 - protein, 162 aa, Triticum aestivum
  Clone ID: TRIAE-23APR03-C8384_1.p
PTDSRKIPLSDTDRDQDDDVLQNVTATRTAVDDDQSPNPSDRPRPCFGVNFGLSRAVSLGSSVACSIMSTGLSSSANPSIGNMDHPSDANIPQQGGASTSGIYSSLDMLRDSVTTQARAAHQARRNLLESEDANLRHSHRRIGPQEPSEGSVRFSRTLSVGR

SEQ ID NO: 10925 - protein, 300 aa, Triticum aestivum
  unsure (1)..(300): unsure at all Xaa locations
  Clone ID: TRIAE-23APR03-C83938_1.p
MEGPKGNGGEKHSADQNHSPNTPAAAGAGGDDVSAAAGRRVGRRPCHEEGEVAPARALEQQERAYMRPSTKVREDSEDDSADAARYEGNDEEEEGIEGGEESDEEEEGNEDGEVGDAEGPELDPARYEDDEAYARALQDAEEREVAQRLMALAGITDLGEEMEHDVEDGEYEEDGDSAQDAWEDVDPDEYSYEELVALGEVVGTESRGVSADTLASLPSXVTYQAEDNQDSNMEQCVICRVEFEEGESLVALPCKHSYHSDCINQWLQLNKPLPCCRYALCAVQKFLPRVTTSHDILLWS

SEQ ID NO: 10926 - protein, 528 aa, Triticum aestivum
  Clone ID: TRIAE-23APR03-C8397_1.p
MDGLGNSALNASEAVMKRPRSVASRRPRPKEQLASEYKDISCAPSRSISPEDEAAAEASGQRRKELYLNGPEGRGSTHHRNALSKKIKKEEGSAGDNDIGHNRSSKPNDAKHITHGVLALASSRNSGSTDASQLSSRDTPVPVENRVRKVKLKVSGLNRIIPKQEPVDVGMPGTSDVSFHRQKQKDSGEQKHHSTRKDSHGNHVDGKRGDKHDISPSSDLVRKSKRVPKKRTLDSDDEDDELRYLEKLKAAKAAPEQPMATDQPLAYGYGEDGLRKKKLSKVSKNKSTPYEVDNDFTMSQFSRDVRKKVKLEDTSDFIVEEEFGLDESDRLIEADSPSGVKIEAPGLTTRQRALQGRGGHGESMIEFPDGLPAAPSSRRQKDKLSDVEIQAKKAEVAQRRKMQVEKAEREQQAEAMRKILGIDTEKKKEERKQKEREDKEKQAKFEEYKRSCIQCVMRPEGTVITFPDTMGLPSIFNSKPISYPPPREKCAGPSCPNPYKYRDSKTKLPLCSLECYKAVQGGAGTMAC

SEQ ID NO: 10927 - protein, 300 aa, Triticum aestivum
  Clone ID: TRIAE-23APR03-C84061_1.p
LLSAPPRLPPSPSIKARALLLRSIPLATAQIQTMTVPPSPEPFRVFVGYDPKEHEAYEVCRRSLIRHATVPLDVRPIRQPDLRASGLYWRTRGHMESTEFSFTRFLTPFLAGYRGWALFIDCDFLYLADVAELIASAVPSDAAAAKRLAVVCVKHEYKPLEATKMDGAMQTVYPRKNWSSMVLYNCAHPKNVAALTPDAVSTKTGAFLHRFSWLDDDEIGEVPFVWNFLVGHNRVDPDDPATQPKALHYTCGGPWFDRYRDCEFADLWIKEAEELRAEKEKRRAEKERLELEDDEDDEGN

SEQ ID NO: 10928 - protein, 404 aa, Triticum aestivum
  unsure (1)..(404): unsure at all Xaa locations
  Clone ID: TRIAE-23APR03-C84291_1.p
MAYTSSLHLSKHLLLPKPHRARPSSSRSPSFVRAGQXVNGAPHVNGHSKKAPNGKVQINGGGAVTRQEGGRRRXGKTHVNGHDRIHXSVTTGGGGQDGTGLRVAYQRRARGAYSEFAAKTALPGCETVPCRAFADALAAVDRGLVDRAILPVESTMEGTALRNYDLLLRHDLVVAQEINLFVHYCLLAXMPGVRATEVRRVISHPMALAHCGRALARLGVDREPVEDTAGAVEMLRSNMMLDTAAIASPRAADLYGLDVLAHGLQDESWNVTRFLLLSKPPSPVAVPVDADAKTSMVVAHRGGSMAVVLKVLSAFSSRNINMSKLEVINNEGGVGEPRPPVMILDTGARGAPTLRAFPHVLYVDCEGAADDPLVREAIKEIEKFAVFVRVLGCYAADTNVYDLQ

SEQ ID NO: 10929 - protein, 320 aa, Triticum aestivum
  Clone ID: TRIAE-23APR03-C84361_1.p
MDRYQRVEKPRPEAAAISENEIRITTQGLIRNYVTYATSLLQEKRVKEIVLKAMGQAISKTVAITEIIKKRIPGLHQDTTISSVSITDVWEPIEEGLVPLEMTRHVSMISISLSPKELDTSSPGYQAPLHAEPLKPRYQQVQRYQQQHQPRQNQGQTDSYVRGRGRGRGRGWGGRGGYGGGYGGYDNNQGGYGGYSNQGGYGHNQGGYGNHGGYGHNQGGYGNQGGYGNQGGYGQNQGGYGGGYGYDQGGYGGYDNGGWNYNQNRGRGGGGRGRGNWGYSGPGYERGGRGAGGPGGPGGRGYVRGRGRMGPGRGRGNQNY

SEQ ID NO: 10930 - protein, 466 aa, Triticum aestivum
  unsure (1)..(466): unsure at all Xaa locations
  Clone ID: TRIAE-23APR03-C8438_1.p
SPNKNPAARSAPISKISPRPPKPQPKSPLCAPRISPPPTPRPASRRRRVLAVAAAAALPAVWSVGDPSRPGPRGRRPLGLVDDLPVRPCHPGFFRSLQAHVLDLASPPAADPRPSLHGCSQXLYDCLLLFAPSTPGFGGTVDQNAVLSFLDPGIDMVLGSSSFQASDADPRHRIGLSCIEVEGDQTLIAGDDLIQSDVILGSKKIEAPVLFXRGIAHAANPSNSLAFKGSISLAITRIQANPEANLASVPSLTGSAVSQVSVMHARNNARVIISGSLDLFSNRLLKSGVKKAGSKMSHDKXGNEQFVTETSKWVFHERGHLKAXNVMHHKVGETNEPSMYRINDDLEYSVEIYEWSGTSWKPYVADDVQIQFFMMSPYVLKNMSTDKSAVYSASFKVPDVYGVFQFKVEYQRLGYTGLSLAKQIPVRPYRHDEYERFITSAFPYYAASFSTMGAFFIFSVAYLYHK

SEQ ID NO: 10931 - protein, 230 aa, Triticum aestivum
  Clone ID: TRIAE-23APR03-C84390_1.p
MATRRSPATTHHRLLLLLLPLLLIGSFLLPLSSAYRPGDIIPMLRSGQYHGSRSVWFDVIGRHCPVFAVNREVLMPIPKPTGFTGADPYKITFQIGHEKFHVPWLYVINRKSSEVPLIDFHLKYTGNDLLGVTAKVVDMPHHFVELHPDIKKNFWDPQNWPKYVLVSYTWEEQSEIDVTAGFYVLFGSGLVLSFILAIYVLQSSQDKLTRFVREAVSDSSLPEGGVAKVE

SEQ ID NO: 10932 - protein, 400 aa, Triticum aestivum
  unsure (1)..(400): unsure at all Xaa locations
  Clone ID: TRIAE-23APR03-C8439_1.p
MAKAGILRRSRRRPRSGVGVMLVFSPGIGLDLGYVXGVLQPTYTTSKCLPPSIRRWXRTRSSPVASTAESCLHIGRPSPRDQSLTPRSXELPKIYVTSHPHRPARLPPGIAVSETDLYPRRLWGEPSEDLTIQPKYLVTFTVGIAQKANIDAAVKKFSENFTIMLFHYDGRTTEWDEFEWSKRAIHVSVSKQTKWWYAKRFLHPDVVARYDYIFIWDEDLGVQHFNAEEYITRGTKHGLEISQPGLEPDRGLTGQMPKRRGDREVHRGTEERPGWCSDPHLPPCAAFVEIMATVFSRDAWRCVWHMIQNDLIHGWGLDFALRKCVEPAHEKIGVVDAQWIVHQGVPSLGNQGKSENGRAPWEGVRGRCRKEWGIFQARLADAEKKYYLDQGITPPNSTSV

SEQ ID NO: 10933 - protein, 613 aa, Triticum aestivum
  Clone ID: TRIAE-23APR03-C8443_1.p
MPEAPSAQPAPASGYAPGAHREALDFIEHVTANAGKVQQRVLAEILAQNETAEYLRRYGVSSSSSPLDPVDAFRRCVPLVTYEDLQPDILRIANGDSSPILSGKPISEFLTSSGTSGGERKLMPTIADELDRRSLLYSLLMPVMSQSLPGLDKGKAMYLLFVKAESRTPGGLAARPVLTSYYRSRQFLDRPHDPSSAYTSPNKAILCVDSYQSMYAQLLCGLVHRTDVLRVGAVFASGLLRAIRFLEKHWPLLCHDIRTGELDPEITDHAVRDAVGRLLHANPALASEIEAECSKPSWEGIIRRLWPRTKYIDVIVTGAMSQYIQTLEFYGGGLPLICTMYASSECYFGLNLNPMCKPGDVAYTLIPTMCHFEFLPVHCSNANAEPSHRDLVDLVDVKLGHDYELVVTTFSGLCRYRVGDVLRVAGFKNEAPMFSFVRRRNVALSIDSDKTDETELHTAVSSAVQHLAPFGASLVEYTSYADTAAIPGHYVLFWELREGSTAVPASVFEECCLSVEEALNSVYRQCRACDRSIGPLEIRVVSEGTFEKLMDYALSQGASINQYKAPRCVRPGPVVELLDARMQASYFSPKCPKWSPGNKQWNTSKELLSIGDA

SEQ ID NO: 10934 - protein, 389 aa, Triticum aestivum
  Clone ID: TRIAE-23APR03-C8498_1.p
MAPPRGRLLAAALCLLFLAGADAGTVGVNWGRVANDLPGPAAVLQVRKHHGIAQVKLYDPEPAVLRALAGSGIKVVVALPNEQLAAAARRPSYALAWVRRNVAAYYPATQIQGIAVGNEVFATAANVTAQLVPAMINVHAAFGQAATWTKAVKVSSPVALSALANSYPPSAGVFKEELAQSVMKPMLDFLARTGSDLMVNCYPFFAYADNAGVISLDYALFRPNAGELDSGSGLKYYSLLDAQLDAVFAAVGRLGSYNGVHVVVSETGWPSKGDAKEVGAGAANAAAYNGNLVRRVLSRNAGTPRRPDADVDVYLFALFNENQKPGPTSERNYGVFYPNQQKVYDVEFVLGGGSVGGKGNGGLGWQDNGAAYVVNQAPKMGKCELPSTV

SEQ ID NO: 10935 - protein, 312 aa, Triticum aestivum
  Clone ID: TRIAE-23APR03-C8502_1.p
ELKIGFNRCDHPNVLPVEEQAKHVGIFGAPVAKNVLMKDKTHRLCIVSGLVHTDVDMKILSQRLGLGKGGVRMAPEENLRQVLQVPLGCVTPFALFNESASAVSLLLDQGFKSKQSCYFHPLTNDVTIALSSSNLDKFLLSIGKQPAYVDLEASPVVGKDNPPDLADLVPSGALCSSEESVENPTPKDAPQVNVPKQKTCLPEVKAKPKVQNKGAESSESKVPTNNGANVEIFASDVLEVIFPLFLSETSKKLNIKQEELTQILKLDDFKRRAAPDLESATNMFKNMAYSAGFHAGFDTMLKSGLGGMPSRK

SEQ ID NO: 10936 - protein, 425 aa, Triticum aestivum
  unsure (1)..(425): unsure at all Xaa locations
  Clone ID: TRIAE-23APR03-C856_1.p
MSIRPLLLPEPPGEVDRAPEIFAGGVAAVRRAVVIGNGCAGAENQCLGLVRALGLADRLTLYRIIRPTGGINKWLHFLPISLHKMVDQVLRHILSNTTFTTLFQGKLSAPYPVSNVQSLGLSSVLEADSKRIATMVRDTFEKEGLAIVVACGRDTIPYASSVRCLAPDNVFVIQIQHPRYRLDRFDLVVTPRHDYYALTAKGQQEVPWLFRRXITPREPPGPNVVLTSGALHQADSAALRIAATNWHDELAPLPKPLVVVNIGEPTRNCNYGVDLAKQLVSSLHNVSETCGSVRISFSRRTPQNVSDLILREFSTHPKFYIWGGEEPNPHLGHLAWADAFIITADSISMLSEACSTGKPVYVVGTEHCRWKFSDFHNTLQKRGAVRPFTGSEDMSDSWSYPPLNDAIDVAARVREVLAQRGWTVG

SEQ ID NO: 10937 - protein, 188 aa, Triticum aestivum
  unsure (1)..(188): unsure at all Xaa locations
  Clone ID: TRIAE-23APR03-C8608_1.p
MRLVARYGPSSAVSTCICAMLMVNQADDVVGSNLVYGLGLKXYVGPDVDAMKAVXSDAYSKRSLKYFETALGDYKAQLEEDPIVHRHLSSLYDTLLEQNLCRLIEAYSRVEIAHVAEMIELPIEHVEKKLSQMILDKKFAGTLDQGAGCLIIFEDAKTEAIFPATLETISNVGKVVESLYMRSAKIMA

SEQ ID NO: 10938 - protein, 403 aa, Triticum aestivum
  Clone ID: TRIAE-23APR03-C8628_1.p
VRFCCKASDRPSPIQALAWPHLLVGTDATGPGNTSAFGVPALMHVRKKLSEKGAKEGLPRCLMLAPTRELAQQIADVLTEAGAPCGINSVCLYGGTSKGPQISSLKSGVEIVIGTPGRMKDLIEMGVCRLNEVSFVVLDEADRMLDMGFEPEVRAILSQTSSVRQMVMFSATWPFAVHQLAQEFMDPNPIKVVVGSEDLAANHDVMQIVEVLDDRARDSRLVALLDKYHRAQSNRVLVFVLYKKEAGRVEAMLNKRGWKAVSVHGDKAQHDRTKALSLFKEGKCPLMIATDVASRGLDIPDVEVVINYSFPLTTEDYVHRIGRTGRAGKKGVAHTFFTQADKGLAGELVNVLREADQVVPPALTKFGTHVKKKESKIYGSHFKEITADAPKSTKITFGDSDEE

SEQ ID NO: 10939 - protein, 294 aa, Triticum aestivum
  Clone ID: TRIAE-23APR03-C866_1.p
MGGLSLQHPWAFAFGLLGNVISFMTYLAPLPTFYRIYRSKSTQGFQSVPYVVALFSAMLWIYYALLKSDECLLITINSAGCVIETIYIIIYLTYAPKQAKLFTAKILLLLNVGVFGLILLLTLLLSEGEKRVVMLGWVCVGFSVSVFIAPLSVIRLVVRTRSVEFMPFSLSLSLTVSAVVWFLYGLLIKDKYVALPNILGFAFGVIQMGLYALYRNAMPSPAPKQVDDADAIKVPEHVIHIAKLGPAAAIELNTHNPMERGMPPPMEDNGLACASDMTKGGIDMVEKATRVEQV

SEQ ID NO: 10940 - protein, 159 aa, Triticum aestivum
  Clone ID: TRIAE-23APR03-C8674_1.p
MRVVVLDGSTVRSFVADEAAFARSVDARFAALDANGDGVLSRAELRRALESFRLLDGAGFGSAEPAPLPGEVAALYDAVFEQFDADHSGAVDRAEFRGEMRRIMLAVADGLGCQPLQVAVDDKGGSFLLEAAEHEAAMIAARVQEERDKTAAEEAADGK

SEQ ID NO: 10941 - protein, 145 aa, Triticum aestivum
  Clone ID: TRIAE-23APR03-C8675_1.p
MAATCRFAAPLGLAPLPRSCAGAKSVAFSIGTTKVATRTRSVAVRAGDGSAETPEILKAAQDAWAKVEDKYAVATIGVAGLVALWTAVGALKSIDKLPILPGVLELVGIGYTGWFTYRNLIFQPDRETLISNIKSTYNEITGSSS

SEQ ID NO: 10942 - protein, 455 aa, Triticum aestivum
  Clone ID: TRIAE-23APR03-C8746_1.p
MSEGPPPAADGAVRRRRRRWAAAAGALLVALLAVALSYRGFPSISSLSRGGGCGCPGARKYTGMVEDCCCDYETVDAINEEVLNPILQDLVALPFFRYFKVKLWCDCPFWPDDGMCRLRDCSVCECPDNEFPEPFKKPYSGLSPENMICQEGKPEATVDRTLDTKVFKGWVETDNPWTSDDETDNAEMTYVNLQLNPERYTGYTGDSARRIWDAIYKENCPKYPSEDMCQEKKALYKLISGLHSSISVHIAYDYLLDESANLWGHNLSLLHDRVLKYPERVENLYFTYLFVLRAVTKAADYLEQAEYNTGNPEEDLKTQSLVRQLLYNHKLRSACPLPFDEAKLWQGENGPELKQEIQKQFRNISAIMDCVGCEKCRLWGKLQVLGLGTALKILFSVDGENNLNQQFQLQRNEVIALVNLLNRLSESVKFVHETGSSSQEIIKQQSFSTLQKGAS

SEQ ID NO: 10943 - protein, 287 aa, Triticum aestivum
  Clone ID: TRIAE-23APR03-C8750_1.p
MGTPEFPDLGRHCSVGDSHQIDFLPFTCDRCDFVFCLQHRSYTSHKCPKANNKDVTVVICPLCAKGVRLNPNEDANITWESHVNTDCDPSNYQRATKKKKCPVPGCREQLTFSNTIMCKDCSKEHCLKHRFGPDHKCPGPRKPEPTFPFANMLRRSQKVEPRANSSGSGSSWWSSSLLNAASSFRSSAEAGMQKLSIATSEAVQKAKDGVTPSSSGGGLVEQCVQCPARFSTVGALIEHAEKSHGNNSRPSRGKVTIDACPKCSKGFQDPVLLVEHVEREHGGTSKA

SEQ ID NO: 10944 - protein, 366 aa, Triticum aestivum
  Clone ID: TRIAE-23APR03-C8757_1.p
MGCFSCCGADDVGKKKKRDDPYVPVPAPGGNYGYNRGPAPTHAIRTSRSQPIEVPAISLDEIKEITKNFSSDALIGEGSYARVFLGVLKDGKKSAVKRLDSSKQPDQEFLVQVSAVSRLKHDNVIQLLGYCALGSTRILAYEYATRGSLHDVLHGKKGVKGSQPGPVLSWMQRARIAVSAARGLEFLHEKAEPPVVHRDIKSSNILLFDNDVAKIGDFDVSNQAPDMAARLHSTRVLGTFGYHAPEYAMTGQLSAKSDVYSFGVVLLELLTGRKPVDHTLPRGQQSLVTWATPRLSEDKVRQCVDPKLGVDYPPKAVAKMAAVAALCVQYEADFRPNMSIVVKTLAPLLNTRTSNRPAGSAGVAVE

SEQ ID NO: 10945 - protein, 402 aa, Triticum aestivum
  Clone ID: TRIAE-23APR03-C8776_1.p
FLDLHPEVSLLRVEQNDEALNPRLPSSGRRTAERLGVPPSQDDYNAAKIKVVGVGGGGSNAVNRMIEYSMNGVEFWIVNTDVQAIRMSPVHSQNRLQIGQELTRGLGAGGNPDIGMNAAKESCESIEEALHGADMVFVTAGMGGGTGTGGAPVIAGIAKSMGILTVGIVTTPFSFEGRRRAVQAQEGISALRNSVDTLIVIPNDKLLSAVSPNTPVTEAFNLADDILWQGIRGISDIITVPGLVNVDFADVRAIMQNAGSSLMGIGTATGKSRARDAALNAIQSPLLDIGIERATGIVWNITGGNDLTLFEVNAAAEVIYDLVDPNANLIFGSVIDPSLNGQVSITLIATGFKRQDEAEGRTAKGGQQMQGDNGRHPSSTGGSKVEIPEFLRRRGPSRFPRI

SEQ ID NO: 10946 - protein, 357 aa, Triticum aestivum
  unsure (1)..(357): unsure at all Xaa locations
  Clone ID: TRIAE-23APR03-C87876_1.p
MAMADPRAWNPNYGVVGSGDRRLAYSRQPSFSSSSPRPPGPGLARSDSSIPMPQPQPPKAPDGRYRWLATRPMRRLALLLGLNAAYSAVELAVGLLTGRVGLVSDAFHLTFGCGLLSFSLFAMAASRTKPDSTYTYGYKRLEVLAAFTNALFLLFLSFSLAVEALHSFMQDESEHKHYLIVSAVTNLLXVNLLGVXWFFRSYARVNIVYRKAEDMNHHSICLHVLADSVRSAGLILASWFLSLGIENAEVLCLGIVSVAVFMLVMPLFKATGNVLLQIAPGNVPPSAFIKCGRQITACEDVSEVSQARFWELVPGHAVGCLSIRVKNSSDDQSVLEYVHGLYEDLGIHDLTIQTEKS

SEQ ID NO: 10947 - protein, 181 aa, Triticum aestivum
  unsure (1)..(181): unsure at all Xaa locations
  Clone ID: TRIAE-23APR03-C87885_1.p
MTRDGVPPAAPAGGGAGDGPRRCSQCGHHGHNSRTCTARPVKLFGVRIGDKPIRKSVSMGNLAQLAEGSGGARAEGYGSEGDDDKPHRKRGESWSEEEHKNFLLGLNKLGKGDWRGISRNYVVSRTPTQVASHAQKXFIRQTNVIDFYFLSLPCLAYGEMRFFIWLHVVWRCSLCSVKKVF

SEQ ID NO: 10948 - protein, 193 aa, Triticum aestivum
  Clone ID: TRIAE-23APR03-C87903_1.p
MASPAPVPASPGSSSQKKRGATESIGLYAVQCCECHKWRTVSTKDEFETIRENFTEDPWFCSKRPECSCEDPPDIEYDSSRIWVIDKPNIPKPPPKTERLVIMRGDLSKMDIYYVLPNGKRARGIGDVQKFLDTNPEYKDRISAESFSFTVPKIVEETVSQSSLWKTKKAKKQDKINASSSKKDKANASSSEN

SEQ ID NO: 10949 - protein, 149 aa, Triticum aestivum
  Clone ID: TRIAE-23APR03-C87956_1.p
MDPEAVRRTLEPTASAADISGSTPYDSFVISGVRLEAAEHGRVLCSFVVTPRIASPQGYLLSGVTATLADQLGSAVFFSSGVGTSGVSLEISVSYVDTAAVGEEIEVEAKLLRAGKSVGVVSVDFRKKRSGKLMAQARHTKYLAVSSRL

SEQ ID NO: 10950 - protein, 352 aa, Triticum aestivum
  unsure (1)..(352): unsure at all Xaa locations
  Clone ID: TRIAE-23APR03-C880_2.p
MGLAGEKFQLGTVGALSLSVVSSVSIVICNKALMSALGFIFATTLTSWHLLVTFCSLHVALCMKLFEHKPFDARTVMGFGVLNGISIGLLNLSLGFNSVGFYQMTKLAIIPCTVILETLFFRXKFSRYIQLSLSVLLFGVGVATVTDLQLNAMGSVLSLLAIVTTCIAQIMTNTIQKKFKVSSTQLLYQSCPYQALTLFLIGPFLDGFLTNQNVFAFNYTSNVVFFIVLSCLISVSVNFSTFLVIGKTSPVTYQVLGHLKTCLVLTFGYVLLHDPFSWRNILGILIAVVGMVLYSYFCSIETQPKNNDVSGQQSKEGDSAPLISDSLGKVENGGDDDEPLKVPMWSSKYPRA

SEQ ID NO: 10951 - protein, 185 aa, Triticum aestivum
  Clone ID: TRIAE-23APR03-C88244_1.p
MEVLVSTTAASAPLSSARVHRRPLPASVTFRAPARRGWRCRSAAPTRPDPVPSEEPASASGSATTTVVTDKPDAPDGEVSGGFVEVTMEDAPVSSPEADGGVDDLLGKLDIQVTPTTVILGGGALIALLILSKIISGMDSVPLLPNVLEIVGTGYSVWFITRYLLFKESRDELFAKFEDLKNNII

SEQ ID NO: 10952 - protein, 119 aa, Triticum aestivum
  Clone ID: TRIAE-23APR03-C88381_1.p
HCISTLLLQLGGAASSGFRLGRGKKKLPTIHERATSISSSLALPSPNHTATAAVARARARGGARRWPRRPRPRQPPARRTGSASSSARRRRPAAVTSASGRCSAAATPSTSSPSTSTPA

SEQ ID NO: 10953 - protein, 117 aa, Triticum aestivum
  Clone ID: TRIAE-23APR03-C88577_1.p
MRGGSSNEYCSCQVCLGKYTLLGDEENPRLAMFERRLPFFGCGIGWCCFLLGFLCPLIWYIAALLYCCKYYNRDPRERPGLAASALLAIMFTAATIIILSVLLVMCAHKRFLNSCGS

SEQ ID NO: 10954 - protein, 132 aa, Triticum aestivum
  Clone ID: TRIAE-23APR03-C88701_1.p
LREQGHGLYYFLSELFFFFFFFLPNNFSIRNRKEHVNLQCVLIMYEHETNQRKIPNNCAHEYMASEEVAEDERGEGRHGDSRGGRRRARGRCWSWSIGCGDRADHDGGGCRHGEDPELQSNRHLLPRLALLQ

SEQ ID NO: 10955 - protein, 254 aa, Triticum aestivum
  unsure (1)..(254): unsure at all Xaa locations
  Clone ID: TRIAE-23APR03-C89354_1.p
MAGVFHATTARPRLPLVLACLSPTTRKLHVTRPAALSMDEASASAPGAKKTTTVFVAGSTGKTGKRVVAKLLERGFGVVAGTTDVGRARGSLPQDPNLQLVRADVTEGADKLVEAVRGVDAVVCATGFRRSFDPFAPWKVDNLGTVNLVEACRKAGVTRFVLVSSILVNGAAMGQLLNPAYIVLNLFGLXLVAKLQAEKYIRGSGINYTIVRPGGLTEQPPTGNIVMEPEDTLYEGFITSDEVSEVAVEALQRP

SEQ ID NO: 10956 - protein, 240 aa, Triticum aestivum
  unsure (1)..(240): unsure at all Xaa locations
  Clone ID: TRIAE-23APR03-C89414_1.p
MACRPAVSNPSALTPAPRRRVVPGRSSTGGRVDCPLRSSSTGAVRLGARRAPAAAFVVRAAAAEGDLDLQAKVTSKCFFDVEIGGDRAGKVVIGLFGEVVPKTVDNFRALCTGDKGYGYKGCSFHRIIKDFMIQGGDYXNDDGTGGRSIYGECFDDENFTLKHVGPRVLSMSHAGPDTNGSQFFICTVKTPWFDNRHVVFGHVLEGMDVVRELESQETSRSDIPKQPCRIVDCGELPLDG

SEQ ID NO: 10957 - protein, 343 aa, Triticum aestivum
  unsure (1)..(343): unsure at all Xaa locations
  Clone ID: TRIAE-23APR03-C8941_1.p
MELLSNRPAHASVPDKYVFPPEKRAALLDDAPSSDVALPVVDLKRATLSDAGRRRLVAEEIVKAGKEFGFFQVVNHGVAEDVVRAFREASAEFFAMPAEEKLPYCSDDQSKPFRVASSTSYDRNQTRYWRDYLKLRCHPVSDELVGHWPARPESFRTXLAEFSEQVHELAQTLLLLIXEGLGLDGGFFAGDLSGGDTQMNVNYYPPCPDPSVTLGLLPHCDRHLLTVLSQGDVAGLQARYRGRWLLVRPVPGAFIINFGHQMEIVTNGVLASVEHRALTNSAVARMSVATLIMPKMDCLIGPAPEMVSEANPPKFREFVFREFMAAYDTAAASREDVLEYFRI

SEQ ID NO: 10958 - protein, 141 aa, Triticum aestivum
  Clone ID: TRIAE-23APR03-C896_2.p
APSRKKISPRSRPSRVRRKEGSRKGVLAEAEGGDGRSSRAGLQFPVGRIHRQLKQRTQANGRVGATAAVYSAAILEYLTAEVLELAGNASKDLKVKRITPRHLQLAIRGDEELDPRVRGTIAGGGVIPHIHKSLINKSSKE

SEQ ID NO: 10959 - protein, 320 aa, Triticum aestivum
  Clone ID: TRIAE-23APR03-C89703_1.p
AGTETETSLPAPVHGSCLHGLHGGRAAAAPVVMVTNDDGIDAPGLRFLVDQLVAQGRYRVLVCAPDTDRSGVSHCITWRSALRCKRVNINGATAFGVSGTPADCASLGISGKLFDGLVPDLVLSGINIGNNCGLHVVYSGTVAGAREAFIYGIPALSMSYNWVAGQSSVNDLKVAAEVCIPLINAVMVEIKSGTYPKGSFLNIDVPSDAAHHKGYKITKQGKYMARIGWEQTVYQKPSVESYQTASMDIDGEKDRDIDTSSANDLLFKRVIVKRSYDEEEGEDMDYKSLADGYITVTPLVALSRAEADVIPYYKACLSRI

SEQ ID NO: 10960 - protein, 348 aa, Triticum aestivum
  Clone ID: TRIAE-23APR03-C89761_1.p
MNSGDAAGSSSGGSGDAGAPRRASRKPKYSKFTQQELPACKPILTPKWVISVFLLVGVIFVPIGVASLLASNKVVEIVDRYDDACVPSNVTDKLAYIQNSTISKTCQRTLKVPKDMKQPIFVYYQLNNFYQNHRRYVKSRNDQQLRDASKANETTLCDPEKTRDGMAIVPCGLIAWSTFNDTYTFQHNTNNITIDKTDISWKSDRDHKFGSDVFPKNFQKGPLIGGKTLNESIPLSEQEDLIVWMRTAALPTFRKLYGRIRVDLKENDTITVTLDNNYNTYSFDGKKSLVLSTSTWLGGKNDFLGLAYLTVGGLCFFLAFAFTLLYLIKPRKLGDNNYLSWNRNSAGH

SEQ ID NO: 10961 - protein, 214 aa, Triticum aestivum
  Clone ID: TRIAE-23APR03-C89763_1.p
MPTPYSAAALQQHQRLVSSSGGLAATGAHRCGEHDGTVPPEVARHHEHAAPGGRCCCSAVVQRVAAPAADVWAVVRRFDQPQAYKSFVRSCALLDGDGGVGTLREVRVVSGLPAASSRERLEILDDERHVLSFSVVGGEHRLRNYRSVTTVHPAPGESASATLVVESYVVDVPPGNTPEDTRVFVDTIVKCNLQSLARTAEKLAGRGAAYGALP

SEQ ID NO: 10962 - protein, 275 aa, Triticum aestivum
  Clone ID: TRIAE-23APR03-C89788_1.p
MDVPAAPAMAFKAYKYKEVLVRDYLLADSYAPYAAVLGGILMCKLAYDFTRIISSFNFKGYASLNNMQKIEWNNRGMSTVHAIFITVMSVYLVFFSGMFSDQLDGPVTVRSSSLSSFTLGVSIGYFITDIAMIYWLYPALGGMEYVIHHMLSLMSTMYAMLSGEAHVYIYMGLITETTTPGINLRWFLDVAGMKNSKAYLVNGVAMVVTWLVARIILFMYLFYHMFVHYDQIKKMNTFGYFLVLIAPCIIFVMNVLWFSKILKGLKKTMAKRHAE

SEQ ID NO: 10963 - protein, 252 aa, Triticum aestivum
  Clone ID: TRIAE-23APR03-C89947_1.p
MAAVAVTRRRLSALLLSSRATPRRFLLLTGAGASASSAHLSPWAPPSRGAKTALPGRPGYSPLNDPSPNWSNRPPKETILLDGCDYEHWLIVMEFPADPKPSEEDMVAAYVKTLTAVLGSEEEAKKKIYSVCTTTYTGFGALISEELSYKVKGLPGVLWVLPDSYLDVPNKDYGGDLFVDGKVIHRPQFQFTERQQVRSRPRPRYDRRRETMQVERRETMQRGPSVQEHRPSFSQQVPHNNGQHEIVPPGRN

SEQ ID NO: 10964 - protein, 479 aa, Triticum aestivum
  unsure (1)..(479): unsure at all Xaa locations
  Clone ID: TRIAE-23APR03-C89994_1.p
MDAAAAAAAGNGSSSSVMCQLVSAEGEQLGAALYLPHNVGPPQLQDIVNQLLHNEDKLPYAFYVGDEELSLQLGAFMQRNNATAEVTLRIVYQPQAVFRIRPVNRCSATIAGHTEAVLAVSFSPDGRCLASGSGDTTVRFWDLSTQTPLYTCKGHKNWVLCIAWSPDGKHLVSGSKSGELILWDPKTGNQLGTPLTGHRKWITAVSWERGPQGGRTGRFVSASKDGDARIWDITTKKCVISLSGHTNAVTCVKWGGDGLIYTGSEDCLIKVWETTQGKLVKTLQGHGHWVNSLALSTEYVLRTGAYDHTGKTFSSPEEMKEAALARYEKMRGNAPERLVSGSDDFTMFLWEPTISKQPKARMTGHQKVVNHVYFSPDGQWLASASFDKSVKLWNGITGKFVAAFRGHVADVYQISWSADSRLLLSGSKDSTLKVWDXRARKLKQDLPGHADEVYAVDWSPDGEKVVSGGKDRVLKLWMN

SEQ ID NO: 10965 - protein, 371 aa, Triticum aestivum
  unsure (1)..(371): unsure at all Xaa locations
  Clone ID: TRIAE-23APR03-C899_1.p
MAMLEGMPVDMVNQVKDYYLIRQTLFDIDTQYVPNKPQGLGAYGILCSSINRETDEKVAIKKIHNVFDNGVCELRTLRELKLLRHLRHENVMXLKDIMMPVQRRSFKDVYLVYELMDTDLHQIIKSPQGLSNDHCQYFLFQLLRGLKYLHSAEILHRDLKPGNLLVNANCDLKICDFGLARTNSSKGQFMTEYVVTRWYRAPELLLCCDNYGTSTDVWSVGCIFAELLGRKPIFPGTESLNQLELIVNVLGTMSESDLEFIXDNPKARRYIKTLPYTPGVPLASMYPHAHPLAXIDLLQKMLIFDPTKRISVTQALEHPYMSPLYDPSANPPAQVPIDLDIDENISSEMIREMMWQEMLHYHPEAATAVNM

SEQ ID NO: 10966 - protein, 370 aa, Triticum aestivum
  unsure (1)..(370): unsure at all Xaa locations
  Clone ID: TRIAE-23APR03-C899_2.p
MAMMVDPPNGMGNHGKHYYTMWQTMFEIDTKYVPIKPIGRGAYGIVCSSINQETNEKVAIKKINNVFDNRVDALRTLRELKLLRHLRHENVIALKDIMMPIHRRSFKDVYLVSELMDTDLHQIVKSSQPLSNDHCQYFLFQLLRGLKYLHSAGILHRDLKPGNLLVNANCDLKICDFGLARTNNTKGQFMTEYVVTRWYRAPELLLCCDNYGTSIDVWSVGCIFAELLGRKPIFPGTECLNQLKLIVNVLGTMSETDLAFIDNPKARNYIKSLPYTPGXIPLSSMYPHAHPLAIDLLQKMLVFDPSKRISVTQALEHPYMSPLYDPSANPPAQVPIDLDIDENIGTDMIREMLWQEMLQYHPEAARMVNM

SEQ ID NO: 10967 - protein, 238 aa, Triticum aestivum
  Clone ID: TRIAE-23APR03-C90403_1.p
MDFSGGAGGATLSEMYQSARRLLLSARDGVARVERLASAPASSSYSASAPLVGAPDPAGAEAVRREVAQIQGLCAQMDRLWRSIPAKGQRDLWKRKVEQLSEEVESLKETLDKHSLRQRKRILEAKERAELFERANGESSHVLQIFDDEAQAMQSARSSSRMLDEAFETGVAILHKYSDQRDRLKSAQRKALDVLNTVGLSNSVLKLIEKRHRVDKRIAYGGMIITVVLMVAFWRWTH

SEQ ID NO: 10968 - protein, 291 aa, Triticum aestivum
  Clone ID: TRIAE-23APR03-C90410_1.p
MGTVLDSHFLALTALVTVGYQLVFFIITALLRFDKVTDFAGSTNFVIIAVLVAALKGTWHFRQIVLTVLVIIWGLRLAVFLLMRILQWGEDKRFDEMRSNLGKLAVFWTFQAVWVWTVSLPVTIVNASSRNPSIEARDIIGWIMWAIGLAVEAIADQQKLKFKNSPSNRGKWCNVGLWSYTRHPNYFGEMFLWWGVFVASTPVLSGAEWLVILGPIFLTLLLLFVSGIPLLESSADKRFGRSEEYRTYKKTTSPLIPLPPVVYGALPDWFKVAFLLELPLYNPGPERDPVS

SEQ ID NO: 10969 - protein, 163 aa, Triticum aestivum
  unsure (1)..(163): unsure at all Xaa locations
  Clone ID: TRIAE-23APR03-C90420_1.p
RAMAAAATEATILELDPSHERAGRVIDDIVRLEKRIFPKHESLARSFHDELKRRNTGLIYSTSGVGDDEEVAGYAMYTCTTFLCASITKLXKESCRRQGLGEALLQAAVDRCRRRRVQRVSLHVDPARTAAVALYRKAGLQVDATIEGYYSAQRNAYRMYMDL

SEQ ID NO: 10970 - protein, 304 aa, Triticum aestivum
  Clone ID: TRIAE-23APR03-C9100_1.p
MDKYEKLEKVGEGTYGKVYKARVAATGQLVALKKTRLEMDEEGIPPTALREISLLRLLSASLYVVRLLSVEQVTKPCGKTVLYLVFEFLDTDLKKFVDGFRKGPSPRPLPTQVVKSFLYQLCKGTAHCHGHGVLHRDLKPQNLLIDKEKGVLKIADLGLSRAFTVPMKSYTHEIVTLWYRAPEVLLGATHYSTGVDIWSIGCIFAEMVRRQALFPGDSELQQLLHIFRLLGTPNEEKWPGVCALRDWHDYPQWKPQHLSRAVPTLEPEGLDLLGKMLQFDPANRISAKAAMDHPYFDSLDKSQF

SEQ ID NO: 10971 - protein, 385 aa, Triticum aestivum
  Clone ID: TRIAE-23APR03-C91097_1.p
MPQAQARAVLPVVLLGCGGVGRHLLRHIVSCRPLHANQGVAIRVVGVADSSSLLVADDVRASGLDDALLNDLCSAKSAGSPLSSLLARGHCQVFNKPEAMGKVIDAATMLGRTTGLVIVDCSATYDTVGVLKDAVDHGCCVVLANKKPLTCAYEDFKKLTSHFRQIRFESTVGAGLPVIASVTRIIASGDPVSRIVGSLSGTLGYVMSELEDGKKISEVVKTAKALGYTEPDPRDDLSGMDVARKALILARLLGQQISMENINVESLYPSELGPEVMSTTDFLESGLAKLDETIEERVKAASLRGNVLRYVCVIGSTGCQVGLQEVPKDSALGRLRGSDNVVEIYSRCYESSPLVIQGAGAGNDTTAAGVLADIIDLQDLFQTRA

SEQ ID NO: 10972 - protein, 465 aa, Triticum aestivum
  unsure (1)..(465): unsure at all Xaa locations
  Clone ID: TRIAE-23APR03-C9148_1.p
MAGAPPTPAEKDALVSSFLEIAAGQTPYSATQPLRRTRSHLEEALQLSYIAGRAASAGAPPPAQRAPEAARPAAPAAAEVEEGFRFHPPPAAALEDGMLQAVGHDDDVRPGLGDQHDALRGXPPFKEAGPATSMRFRFWDXPMLTRPHHLASRAIPWGASYXSSSCSRDKLASLYRPPFDLMFNGPFDKAKLEASSLDKWLLINLQSTEEFSSHMLNRDTWANEAVAQTIRSNFIFWQVYQDTGEGRKVCTYYHLVSVPAILLIDPITGQKMRGWSGMVYPDSLLEDLMPYLEKGPKEHHAAQPQKRPRKVDQETSMDRQGKTAVESEDEELARAVAASLEENKGAGGSDGADEKSNPVEEMEPSLSVKIEYPPLPEEPKVSRDLLCRVAVRLPDGQRIQRNFLHTDPIKLLWSFCSSRVEDGEKRAFHFGQPIPGAAINKLQYSSEQTFKEAGLANSMINLLWD

SEQ ID NO: 10973 - protein, 315 aa, Triticum aestivum
  Clone ID: TRIAE-23APR03-C91532_1.p
MDPRRDGGGGGGGASGDGDGNNQILWDWQEKEHGEPSDGNHDVAKFVWDCLNRDDDDDELLGLLGNQTPLRDCRAFFDIGDITCKETLDLEESRESKRRRVLEYPSEVNQPEVGDHEMCSNFVTSEVAETSLLCTDEPQSLNWNMQLNSDDLDKFSSLSNEASYEPSDNQLDNYSEGATMYYTPDQMPSSQESVTYIGCQTDVPGTSEIAPVTESLIMHETRKLSTLKVSKGGSSMIKAKQNVTTSIAYPFTLIKPSWEEGDVTLKDINQRIHAPPKKPPEILETSAFSGKPVIGKTRIRTEGGKGSITILRTKG

SEQ ID NO: 10974 - protein, 136 aa, Triticum aestivum
  Clone ID: TRIAE-23APR03-C9169_1.p
PPIHVRLYMKRIVLYYHVMKVELGYAFLELCGHAHGGGDSTFGWFHFKIARKIGGACCVCILDVIFLRSTSNEHGSFAFEAICLKVLSSRVKKLLDCVCKISLLLLCLSRVVCQGLFRCWLLCGILPILLITSLCV

SEQ ID NO: 10975 - protein, 307 aa, Triticum aestivum
  Clone ID: TRIAE-23APR03-C91_32.p
MRPPARGGRGGRGFGGRSDGGGRGGRGFGGRSDGGGRGGRGGRGGRTPRGRGGRGGGGRGGAGMKGGSKVVVVPHKHDGVFIAKAKEDALCTKNMVAGESVYGEKRVSVQNEDGTKVEYRVWNPFRSKLAAAVLGGVDNIWIAPGARVLYLGAASGTTVSHVSDIVGPTGLVYAVEFSHRSGRDLVNMAKKRTNVIPIIEDARHPAKYRMLVGMVDVIFSDVAQPDQARILALNASYFLKNGGHFVISIKANCIDSTQAPEAVFAAEVEKLKLEQFKPSEQVTLEPFERDHACVVGGYRMPKKPKAT

SEQ ID NO: 10976 - protein, 181 aa, Triticum aestivum
  unsure (1)..(181): unsure at all Xaa locations
  Clone ID: TRIAE-23APR03-C91_33.p
MGLSFGTLFGALFAKKEMRILMVGLDAAGKTTILYKLKLGEIVTTIPTIGFNVETVXYKNISFTVWDVGGQDKIRPLWRHYFQNTQGLIFVVDSNDRDRIAEARDELHRMLNEDELRNAVLLVFANKQDLPNAMNAAEITDKLGLHSLRQRHWYIQSACATSGEGLYEGLDWLSNNIASKS

SEQ ID NO: 10977 - protein, 463 aa, Triticum aestivum
  unsure (1)..(463): unsure at all Xaa locations
  Clone ID: TRIAE-23APR03-C91_34.p
MEKAIDRQRVLLAHLLPSASSQAQLSASACAAGDSAAYQRSSCFGERRPSSSLPTRTPICKXAKRGGFKDTYPEXDFLTQFLKAVLDKTGINPAQIGDVVVGTVLGPGSQRAIECRTASLLAGIPETVPVRTVNRQCSSGLQAVADVAAAIKAGFYDIGIGAGLESMSVNSVGWEGQVNPRVIELQKAQDCLLPMGITSENVAQRYGVTREEQDKAAVESHARAAAATASGKFKDEIISVHTKLIDPKTGEEKKVVISVDDGIRPGTTLSGLAKLKTVFKKDGTTTAGNSSQVSDGAGAVLLMKRSVAVSKGLPILGVFRSFAAVGVDPAVMGVGPAVAIPAAVKSAGLDIDDIDLFELNEAFASQFVYCCNKLGLDRSKVNVNGGAIAMGHPLGATGAXRCISTLLNEMKRRGRDCRFGVVTMCIGSGMGAAAVFERGDSVDELSNVRHIQSHNFLSKDAAK

SEQ ID NO: 10978 - protein, 240 aa, Triticum aestivum
  Clone ID: TRIAE-23APR03-C92158_1.p
MDQPASDAGGFLEVRLFYVRLSPRGSGAAAPPRLSLAIHHAGAEASPSSLPLRLDRRDPVSGEATYVSTAAARLPPPDASFEVADHRDAALLRGTLRRCPDAKADSPAWAIDCVPADAAVASASAFEVYVAGYCAGEPAVLTRALRLATPEEAAGGLVRRRSAPLAAMCDEDESDLNMGTRAYPEGWYSDDDDGQLTWFNAGVRVGVGIGLGVCVGVGIGVGLLMSSYQATARNLKRRFF

SEQ ID NO: 10979 - protein, 258 aa, Triticum aestivum
  Clone ID: TRIAE-23APR03-C9217_1.p
ALAVLHRYPILAILVVGFGFWMSTHNDECRRSLTIPVMGLGGVIFLMSLAGFVGAWKNISCLLWTYLIMLFVVLVAIMVFTVLAFIITNTGTGHAVPGSRYKEYRLQDYSSWFVKQLNDTDKWTHLRSCLVKSDDCNSLSKRYKTLKQYKLAELTPIESGCCRPPAECGYPALNASNFDLSYHPVSTNVDCKLYKNDRFLRCYDCNSCKAGVAQYMKTEWRVVAIFNVILFIILSFVYFVGCCARRHAGGSDSKVPRR

SEQ ID NO: 10980 - protein, 206 aa, Triticum aestivum
  unsure (1)..(206): unsure at all Xaa locations
  Clone ID: TRIAE-23APR03-C922_2.p
MVSLSTWFRYAAHKFEYSISLSWKKYTVGQINSTEMTDAIWKSFFQGKLTFXQWIKGGEAMAPVVAPTGGTVLVRKLATLSPKELFVGDIVLLKDPEKSDDLIVRRLAAVQGYEMVSTDEKDEPFVLDKDECWVMADNQELKAKEARDSRLFGPVPMTDIVGRVIYSLRTAVDHGPVDNSRVAMFQDSPVLAVELDVEEMVKNNKM

SEQ ID NO: 10981 - protein, 313 aa, Triticum aestivum
  Clone ID: TRIAE-23APR03-C92478_1.p
MAAASRSLLARLRHLSLAGPRLPPCRLFSAEPLVSHPDDDDAGAGGEGGGRIIEARPAVMGPDSRRTGVIGVKCGMSAMWDKWGAKVPITVLWVDDNVVCQVKTAEKEGFYALQLGAGQKKEKHLTKPEVGHFRSQGVPLKRKLKEFPVTEDALLPVGTTISVRHFVPGQFVDVIGITKGKGFAGGMKRHGFSGMPASHGASLSHRSIGSTGQRDAPGRVFKNRKMPGRMGGVQRTVKNVWVYQIDPARNLLYLKGQVPGPQGSFLFVKDSIYKKPDRAFLPFPTYFSQEGELEDMEPLIADLGDVDPFMAAD

SEQ ID NO: 10982 - protein, 190 aa, Triticum aestivum
  unsure (1)..(190): unsure at all Xaa locations
  Clone ID: TRIAE-23APR03-C9250_1.p
MSPDVPSQVYKLEVQGRGHGARPTMGRNPTQVGRVPLNTRSVTRRTHRSAAKSPSRWSGSKNIAASELVGMLSRTRGAYATSWATDYTVPHAVIXVVIDSTGXARINIIKDELFRLIQHADLDNTVVLVFANKQDLKDAMSAAEITDALSLHSIKNHDWHIQASCAITGEGLYDGMGWIAQKVAGKATAS

SEQ ID NO: 10983 - protein, 192 aa, Triticum aestivum
  Clone ID: TRIAE-23APR03-C9250_3.p
MGAWMGGVVFSMFPGKEVQRSVVRWGSTNPREKAPPALFQAPLWGGRCFPPPPPPPPIGNSEEGVFKNIRFEVWDLGGQESLRASWATYYIGTHAVIVVIDSTDRARINIIKDELFRLIQHADLDNTVVLVFANKQDLKDAMSAAEITDALSLHSIKNHDWHIQASCAITGEGLYDGMGWIAQKVAGKATAS

SEQ ID NO: 10984 - protein, 184 aa, Triticum aestivum
  unsure (1)..(184): unsure at all Xaa locations
  Clone ID: TRIAE-23APR03-C9250_4.p
MGAWMSRVWFLMFPSKEYKIVVVGLDNAGKTTTLYKLHLGEAVTAAPTIGSNVEEVVFKNIRFEVWDLGGQESLRTSWATYYSGTHAVIVVIDSTDRARINIXRDELFRLIQHADLENTVVLVFANKQDLKDAMSAAEITDALSLHSIKNHDWHIQASCAITGEGLYDGMGWIAQKVAGKATAS

SEQ ID NO: 10985 - protein, 156 aa, Triticum aestivum
  Clone ID: TRIAE-23APR03-C92735_1.p
MAAAPAPAPSPPEASPPPLDASASASDDEWDADGFVIPDVTIQDDDDDVTTHSVPKARDPEPQQAKEEKIYLGPHGAPPSGAKQQQLNTVGRKQSVRNKLKEADRKSSGNAQENKVESLRELMGAVTTDGRGMAKSSRRDWLDPHCRESEFDRKPR

SEQ ID NO: 10986 - protein, 205 aa, Triticum aestivum
  unsure (1)..(205): unsure at all Xaa locations
  Clone ID: TRIAE-23APR03-C9275_1.p
CATYFDTTDTSGTVALCTKMWLRRTEELMPLXLWHYGILNIPILTLLSSLINGESGLAHVKRHLLENASQNIVTVEQKLSRGWGGENAYHVGGYRYILSDPNRKVSRASPPGKVITLSKDSLLALNRLRGEIDLEKSRAKRSDPTHDKDYEVCIRAKNNAWIIAKISRGKELYMAIEKGGETLLYASTAVEKFSNRYCEGAFSTD

SEQ ID NO: 10987 - protein, 173 aa, Triticum aestivum
  Clone ID: TRIAE-23APR03-C9282_1.p
METSLRLRGADNTTGQQLGLRIHAKQKLPLAYNALLQAHAEIDTATRKPSLLAVLARHFFPQLSANVGAGVQLERGNIFRYTLRGKKAVSFTDDGLLGLNIKGRLLADKNFKPRRKSGAIELAWTILDFRKGQDVRMKAGYELYRKMPYFQLRENNWTLNGYMDGKWDVRFDM

SEQ ID NO: 10988 - protein, 307 aa, Triticum aestivum
  unsure (1)..(307): unsure at all Xaa locations
  Clone ID: TRIAE-23APR03-C9286_1.p
MTTLYFQPKRIKPQSVCPRRGDKSKAKKNTPSSPSTKAPIARVSDPDLVDSSSSNGDADVKKKAEKSNSRPVAKESLPFEDSKEKRKIQKASNQRVVKNDEESNCEKVKPQKVGSTPSYGXFAFKCNERAEKRREFYSKLEEKIHAQELEKNNMQAKSKEMEEAELRQLRKSLNFKAAPMPSFYKEPPAPKVELKKVPTTRPRSPKLGRSKNTTSAGTAVSTNPSSRPVRLSLDQRASQNSAKTAAPAPKKSQRKSLPKLPSEQTGSVDIATSISSAEQLEISKSTADPIRTPIRAQVTPDDHVLHA

SEQ ID NO: 10989 - protein, 229 aa, Triticum aestivum
  Clone ID: TRIAE-23APR03-C92871_1.p
MAAAAAASGATAAVESVVVVHNVAKRHNVGTLARSATAFGVAEVVVVGRRDVSAFGSHGSTSHLRFRHFTSLATACAYLKDERGCDICGVEITDDALPVTAHPFRRSTAFLFGNEGTGLSQKECEVCDFFVYIPQYGGGTASLNVTVAASIVLHHFGVWAGFPERGREGNKFVVAEKPRGQSRGLYCSDSIEDLIEERKARRENACDIFEENGSNHPQESNGLGMMFTD

SEQ ID NO: 10990 - protein, 368 aa, Triticum aestivum
  Clone ID: TRIAE-23APR03-C92887_1.p
MGVPGGGADPRDPRQGPPHAAHNRSSQAFAPAAAAAAASIISGDLNLDSTLPSKLPPPPVFRSSAAPPPQGSPASRRARDDTMVGLSEGEKHFIRGGIAQDLRADGRRRLQFRALTVETGIIPQANGSARVRMGATEVIASVKAELGKPTILHPDKGKVSIYVDCSPTAAPMFEGRGSEELSAELSVGLQRCLLGGKSGAGAAIDLSSLIVVEGKACWDLYIDGLVVSSDGNLLDALAAAIKVALSDTGIPKVNVSLNNETDGEPEVDISDEEFLQFDTSGVPVIITLTKVGKHYIVDATSEEESQMSSAVSVSVNSHGQICGLTKRGGAGLDPSVIFDMISVAKNVSQRFYTLLESAFAAAEAVADE

SEQ ID NO: 10991 - protein, 340 aa, Triticum aestivum
  Clone ID: TRIAE-23APR03-C93024_1.p
MAASIAAAASVSHLLLGPKPKPTTPPRLSLLPRRRSGAAGAISASASAASDFLAPVPSLKSRLAAGDTLYGLFLLSFSPTLAEIAALAGYDYVVVDMEHGPGGITEALACLRALDAARTPAVLRLPEACPVWAKKALDLGPAGLMLPAVESPAAAAEAVSHCRYPPRGVRGAAYPIVRASAYGLDDSYLSRCEDDTLIICQVETAAGVAEIDAIAAVEGVDVVQMGPLDLSASMGYLWDPGNRKVRAALREAERKVLEARKKKDAAPETNAAYLGGFAMPNDPAEQLKHRGYHMVAGAVDIGLFRKAALEDVKRFKEASMEIGEAEGEEEDEKEDGYWSE

SEQ ID NO: 10992 - protein, 274 aa, Triticum aestivum
  Clone ID: TRIAE-23APR03-C93041_1.p
MAADTAYAKRVLLACNGGGDAVSRGVAVGLARHGCRLVLLGDEGALAATAEEARRCAAGGASAVAVVGLDLAACDEAAVGAAVEAAWRCFGHGGLDALVNCCSYEGEVQDCLSVTEDEYNKTMKVNAITPWLLIKAIAKRFRDAQSGGSVVCLTQIIGAERGLYPGAAAYGTSLGAVHQLVRLSAMELGKHKIRVNAVCRGLHLGDKFPVSVGEEKAEKATGEVMPLRRWLDPEKDLASTVLYLVGDESRFMTGTTIYVDGAQSIVRPRMRSFL

SEQ ID NO: 10993 - protein, 152 aa, Triticum aestivum
  Clone ID: TRIAE-23APR03-C930_3.p
MAASLWRAVMGTGAPPADATDGIEFWREPERGGWLDKQGEYIKTWRRRWFVLKQGKIFWFKDSSVTRASVPRGVIAVASCLTVKGAEDVLNRKFAFELSTPGETMYFVADSDKEKEDWINSIGRSIVQHSRSMTDDEIVDYDSGRPAAGGKS

SEQ ID NO: 10994 - protein, 474 aa, Triticum aestivum
  Clone ID: TRIAE-23APR03-C93116_1.p
MAARRYTEHEEALEIKSLRRIIAAYINYQDAAEKDVKRYERSFKKLSPAHKELLFHLGLKYQRLRWCISMNTSFIMNMLEAFEPPFDMSQCVDGDCHDCAEHMHGHSHADTINNSELLAQHCCPEEGANTRETENKKDEEVHMVGCSQPAACNLGISQGEDKSCNDGKDASAAANCQDTDCFASSTDENVTPGHRRAPSLPLDVPPVDVDKVRCIIRNIVRDWAQEGQIERDECYKPILEELNRLFPDRSRPPSCLVPGAGLGRLALEISSLGFVSQGNEFSYYMMICSSFILNHTQEANEWTIYPWIHNNCNSLSDKDQLRAVSFPDIHPSSAGITEGFSMCAGDFVEVYNEESQESAWDAVVTCFFLDTAHNIVEYIEIISKILKDGGVWVNMGPLLYHFADAYGPDDDMSIELSLEDVKRVAYHYGFVMEVEKMIDTTYTANMVSMMQNRYRAAFWTMRKDASRSKAKKRQ

SEQ ID NO: 10995 - protein, 423 aa, Triticum aestivum
  Clone ID: TRIAE-23APR03-C93274_1.p
MYRGGLDRFKKAQALEPFSVQQSGSGAKSVPPAVKVQPAPLVPPQSSHLGPSQSQHAPQSAGSSMGGQEAAGAPRPAGTQFGGGQSTWQPPDWAIEPRPGVYYLEVMKDGNAIDRINLDKKRHIFGRQVPACEIVLDHQSVSRQHAAVVPHKNGSIYVIDLGSVHGTFVANERLTKDNPVELEVGQSLRFAASTRAYVLRKNTAAFFPTQSLPSDVSLPSPPDSDDEDAVVAYNTILNRYGVSKSDVPLKRKGSSGDASASAVNDDNQAVGRPSKRIRKRRVSFRDQVGGELIQVVGISDGADVETEPGPVGVKEGSLVGKYESLVQVTVIPKGKEQTSSKDSASHSGVTDKLQHMLNKVKSTSRGGMYDDLYGDSVPAKLGSSWAYKSDGQPEQVKVVDEKKSSRDVGANPADDSDDDLFGD

SEQ ID NO: 10996 - protein, 136 aa, Triticum aestivum
  Clone ID: TRIAE-23APR03-C9365_1.p
MSILWEKSRAWRWLVGRTRDSKPFFFTFAALCGVVPGVVGYGVMQLTSSRNDKLEAHLRSNARPETTMMGQVNRERLAEFLGEIQRKENTNDRYVAALKGETLTRKRYERIQPVPQQAAQENAKDQQATKESAKAK

SEQ ID NO: 10997 - protein, 518 aa, Triticum aestivum
  unsure (1)..(518): unsure at all Xaa locations
  Clone ID: TRIAE-23APR03-C936_1.p
MVEAAAGRRSGTSPRRPSGGGEQQLPLVAVALATRVVMVTSAPPAGGGVGGGGAAAGGRCLDDLLGCLLGVLRVLGFPWAASPQRQPRPVPPRGAIPSTADGRRFAAELXRIPGRIAGNGACAVASLYTMQGKKGVNQDAMIVWENFCSRDDTIFCGVFDGHGPYGHLVAKRVRDLLPVKLGADMGTDKGRETPASNMEGNTNEVGLPVNPERKETTTSVAAEQDREYPEIFTTFRTSFLRAFHIMDRDLKLHKNIDCFFSGTTAVAVLKQGHNLIIGNLGDSRAILGTRNEDGQLIAVQLTVDLKPNIPSEAQRIRQRRGRIFALPEEPEVARVWLPKYNSPGLAMARAFGDFCLKEYGLISMPEVSCHRVTEKDEFIVLATDGVWDVLSNTEVVSIISRATSRASAARFLVESANRAWRTRYPTSKIDDCAVVCLFLNTHEADQPSSSAANNLANALEVSGDKHSTVVQLSTGVSADVVNALVKDTNELSLVDAVAKPVTVSDLTKDGSGTKQSII

SEQ ID NO: 10998 - protein, 142 aa, Triticum aestivum
  Clone ID: TRIAE-23APR03-C93703_1.p
MAAACSLSPLPLAPPVAPRPALFSRCVAAPRRGRNAGGGTGRLRLARRLRPPAAAIEEVEQTEAMMRVAADDDSITATVVSVLLTVSFVGLSLLTIGVIYLAVQDFLQKRESEKFEREEAERQKEEARQKRAKARGKKRNRR

SEQ ID NO: 10999 - protein, 128 aa, Triticum aestivum
  Clone ID: TRIAE-23APR03-C93891_1.p
KQKYPIKRKDEMNKNSKCDGPKAGESHQRKWPTPDAAEDINDHRRPHPLLGTVLWAGGKGHDDIGDHGGIWSSATMEAPTRVVAYGVSILGHLDGVLLYAEQRHRLRPGTSHACPIHPVVQRLGHCTA

SEQ ID NO: 11000 - protein, 128 aa, Triticum aestivum
  Clone ID: TRIAE-23APR03-C9390_2.p
PPFAPGGSKKRQPAAPPTNKPRRTSYALLPDARTLCTATANCWSAPSKRCMGTYPFNTKDSVWRWHGEWALPFSGQASTVNSPLCDEGEDERAMPMPALADRLAIYSAAACRPPPLSLTLHRRRQDLQ

SEQ ID NO: 11001 - protein, 196 aa, Triticum aestivum
  Clone ID: TRIAE-23APR03-C93936_1.p
MAANPDREVCHRAGRGGKMLLPVMAVLAAVVLASLPSAAVATNYTVGDEKGWNPKVDYTSWVKKHRPFYKGDWLLFEYQNGRSDVVQVDEVGYDNCDKESAISSHSKGTSYAFQLKEAKDYFFICSYGYCYSGMKLAVTAKKGPASSSPDSGSSSSSSSSPAAKSSSKSAAPPIAARNAAPLAAAVGAAAMLLRML

SEQ ID NO: 11002 - protein, 647 aa, Triticum aestivum
  Clone ID: TRIAE-23APR03-C93_1.p
MAATGVGAGCLAPSVRLRADPATAARASACVVRARLRRLARGRYVAELSREGPAARPAQQQQLAPPLVPGFLAPPPPAPAQSPAPTQPPLPDAGVGELAPDLLLEGIAEDSIDSIIVAASEQDSEIMDANEQPQAKVTRSIVFVTGEAAPYAKSGGLGDVCGSLPIALAARGHRVMVVMPRYLNGSSDKNYAKALYTGKHIKIPCFGGSHEVTFFHEYRDNVDWVFVDHPSYHRPGSLYGDNFGAFGDNQFRYTLLCYAACEAPLILELGGYIYGQNCMFVVNDWHASLVPVLLAAKYRPYGVYRDSRSTLVIHNLAHQGVEPASTYPDLGLPPEWYGALEWVFPEWARRHALDKGEAVNFLKGAVVTADRIVTVSQGYSWEVTTAEGGQGLNELLSSRKSVLNGIVNGIDINDWNPTTDKCLPHHYSVDDLSGKAKCKAELQKELGLPVREDVPLIGFIGRLDYQKGIDLIKMAIPELMREDVQFVMLGSGDPIFEGWMRSTESSYKDKFRGWVGFSVPVSHRITAGCDILLMPSRFEPCGLNQLYAMQYGTVPVVHGTGGLRDTVETFNPFGAKGEEGTGWAFSPLTVDKMLWALRTAMSTFREHKPSWEGLMKRGMTKDHTWDHAAEQYEQIFEWAFVDQPYVM

SEQ ID NO: 11003 - protein, 820 aa, Triticum aestivum
  unsure (1)..(820): unsure at all Xaa locations
  Clone ID: TRIAE-23APR03-C9420_1.p
MTIEKMGRKKNPIVFLDVSIGDGPDERMIFELFANVAPLTAENFRALCTGEMGIGQSTKKPLYYKGSTFHRVIKGFMAQGGDFSNGDGNGGESIYGEQFEDENFVLRHDDXGLLSMANAGRNTNGSQFFITFKPNSHLDRKNTVFGKLILGNDVLKRIEHVDVDGSTNKPIVPVRIVDCGELVDGKGRGSVSTENDKKKVKSKLSIDSSEDEGNEEKHKGRRKKSLKRRKKKRRYSSSESETSSESESSDSESESDYSSESSDISSSSDDKRRRRKRHSKKDKRKHGKRRRDRRREKRRRKRDRKSKQKSKRMVESDSETGNASDGSSEDARRKRQRHGRKSKATSQISAEDHTAVAALKDATSTQEKIGTPRSLAQEDKSQLENGEMRTNGVTDSKSERKSGIMPVLTGNRSKSRSQSTSANHSMSKSMSVSPRSPIKRSNVSLERLVSPSPVHQRSRSPVHASKQKESRSPPRQRNMSMSPHRRSPSKSPPGRASRSPVVRRNRSPVEVRTRSISRSPARSLQRRSPSRSPERTHVRKSVSPSPTPMEKGKSISRTSARSPLHKGFSRSPDMPPRKTTSRSPQRNAHRNFSRSPVGSSRRSLTPVRGGRSRRNASRSPSPPRRAVSPPNHGRSPSRSVSPDGSKRIRRGRGFTQRYSFARQYRSPSVDRSHRYGGRGDRDRYISHRGSRYRSPPRRYRSPPRRASPRYRRRSRSVSRSPPAYRDRTRGGGYSRSPVRSRSPPGGKPSSRGDRARSLSRSRSLSGSRSRSPPPVQDRSPIASPSPKRASNDRSRSMSVSPEGKKGLVSYGDGSPDSAGK

SEQ ID NO: 11004 - protein, 142 aa, Triticum aestivum
  Clone ID: TRIAE-23APR03-C942_26.p
MAGIGPIRQDWEPIVVRKKAQNAADKKDEKAVNAARRSGAEIDTTKKYNAGTNKAASSGTSLNTKRLDDDTENLSHERVSSDLKKNLMQARLDKKMTQAQLAQMINEKPQVIQEYESGKAIPNNQIIGKLERALGAKLRSKK

SEQ ID NO: 11005 - protein, 480 aa, Triticum aestivum
  unsure (1)..(480): unsure at all Xaa locations
  Clone ID: TRIAE-23APR03-C9440_1.p
QAVREPRDHAALVAPPVGVVGRRRPPGQGAVGRFGWAAVAGVLVPLAGLAGDAAGRPARAWGWPASLGAGRRGSLPPGDMRXPLVGGMWAFLRAFKSRRPDSFIDSFARRFRRAGLYRAFMFSSPTILVTTPEACKQVLMDDDTFVTGWAQGGPWPRPRAPQTRAAPGWAPSPXDGGGPRTGPSPDRSFVGGAAARTGAELESTYPGVNFGGRAMAIDLPGFAYHKAIRARRRLVAALQCVLDERRARGAKTAGVDMMDRLISAEDEGGRRLQDDEIIDVLVMYLNAGHESSGHITMWATVFLQENPDILAKAKAEQEAIMRSIPPGQKGLTLRDFRKMEYLSQVVDETLRFVNISFVSFRQATRDVFVNGYLIPKGWKVQLWYRSVHMDPQVYPDPKKFDPSRWEGPPPRAGTFLPFGLGTRLCPGNDLAKLEISVFLHHFLLGYKLTRKNPNCRVRYLPHPRPVDNCLAKITRVSSSH

SEQ ID NO: 11006 - protein, 112 aa, Triticum aestivum
  Clone ID: TRIAE-23APR03-C9466_1.p
PRVRPRVRIRWSSSNKDDDKTELTRAEVESLRSEIADADERVSQLKARLENIDEALRYALLSGYLHIRSRWTQLPGEPPIIDDADVDDWLPRFVVLQGQCLYYYLKCSGYCR

SEQ ID NO: 11007 - protein, 135 aa, Triticum aestivum
  Clone ID: TRIAE-23APR03-C9466_2.p
IELTRAEVESLRSEIADADERESQLKARLENIDEVLRYAFLSGYLHIRSRWTQLPGEPPIIDDTDVDDWLPRFVVLQAQCLYYYLKSTDLSPQESLLLRDVEPTSYPDDGGRPQPPSQGLTPLRFLRTRKEERGP

SEQ ID NO: 11008 - protein, 479 aa, Triticum aestivum
  Clone ID: TRIAE-23APR03-C95004_1.p
MDSGWKSNGNDEEPTATPTKGIEGIRSTINPGNLPCPVVCATGEQVGVSGSKRKRRKHYVYLVFDDWSYGYSIHKVNLFPCSRRRKQTAFSAPADVPCLPPALFRLEAAHGSPEYFASAFGTRILAMHTRDPGGKRLLSGTFVPMLDVSSLSMTFCPGQEYPINPIYLSVGNTRLFCLSEASFEMLHWEPLCPPPLGRRRSKEWSWQRLEKPPFKSYNVTSYAVHPQRCTIFVSTKMNDIEATFSFDMEKQKWEQLGSWALPFAGRGHFDPYLNAFVGLSKDSDTLGQVYSCCLSSSSTGHGLEWKLGKERLFSQDPAERHVGATLVYVGQSKFCLVQCVSIEDESDGPKLKEEGNVGGPVYRTEDRGADLKLNEGDVQELKEEGDVQELKEEGDVDGPGYSIEDEGYDQELMDEGYDQELMEERYVPCCCLYRLTTFSLSYDIKGDLTTGNSCRVLYYKVPEAITSSFLVEDPVAFCM

SEQ ID NO: 11009 - protein, 225 aa, Triticum aestivum
  Clone ID: TRIAE-23APR03-C95015_1.p
DKDDSVTAAVRGRAPSAQAASFTELLTGLAAATPAVAQHKQHNSWQQMTASATADYLGFSQPRKSGHGMLHTFASPAPHLGNIAPVAMAPAQHFSLSAGGGDSQTEMPHFSFSHDHYMPVHAAPASGPAVDYSLNFSMSSGLVGVNNTRGTLQSNSQPHLSGHHHHQQQLQRLSTPLDAPHIPFLFSPAVAVASPTTAESHFGAAAALQLWEGFRHSDMKEKGKN

SEQ ID NO: 11010 - protein, 221 aa, Triticum aestivum
  unsure (1)..(221): unsure at all Xaa locations
  Clone ID: TRIAE-23APR03-C95462_1.p
MCSRRRSVAYFAHGSHRLLPADADDDGEFTCDGCLVAGAGPRYLCGHPGCGFKLHEVCARSFPRTLKSIVHSQHRLKRRESAGDGNVRCEVCGEDVKGACYGCSAGGCASATVVVHPLCVRLPPVARGPAAAHPCGHDAWLVKKSDGGAAPASMCAASMXAWRYRCGTCRVDVHPRCFVPPADQCRGGEASAISMGKRCCLVFGQDLTSCLNISYYYRGAG

SEQ ID NO: 11011 - protein, 353 aa, Triticum aestivum
  Clone ID: TRIAE-23APR03-C95593_1.p
MAGDVARRELRARVGAMPWAVRLQLRALEAAVDATQRRDGTVNRFLFSLLVDRQAPANPARADAGGVRSVDVTVDASTGVRARVYFTAGAGAEADASPRPVIVYFHGGGFTVFSAATRPYDELCRTMCRETGAVVVSVTYRLAPEHRYPAAYDDGEAALRYLATTGLPAEVPVRVDLSRCFLAGDSAGANIAHHVAQRWTAAPATTPPAVHLAGLLLLSSYFGGEDRTESEQALEGVAPIVNLRRSDFWWKAYLPEGADRNHPAAHVTGEAGPEPELPDAFPRAMVVVGGLDPLQDWGRRYAGMLRRKGKEVRVMEFTEAVHAFYFFPALPETGKLVAEISAFVESTAPSSTA

SEQ ID NO: 11012 - protein, 185 aa, Triticum aestivum
  Clone ID: TRIAE-23APR03-C9565_1.p
RLRTRGLEAEQRPSKPQSAVVALRRSAKEACGSMRTKLALVATAVRVAISRGIQDGGILCDWVPAENQYLSLSCGWTAVSLLDCLLPAVSLPGGFLLAEVRSSKISSARCPWIRRSRAVKILQISSSPDLCGWIFDRRLGYVDGFVWGGGRLGTIRVGDRDEIAAGAKGELAGGNQPPQLLLLRE

SEQ ID NO: 11013 - protein, 362 aa, Triticum aestivum
  unsure (1)..(362): unsure at all Xaa locations
  Clone ID: TRIAE-23APR03-C9582_1.p
MEAVVVDAGSKLLKAGIALPDQAPGLVMPSKMKTEVEESEVADGAAAVVEEVVQPVVRGFVKDWDAMEDLLTYVLYRNIGWEMGDEGQILFTQPLFTPKALREQLVQLMFEKFNVSGFYDSEQAVLSLYAVGRISGCTVDIGHGKIDIAPVCEGAVQHVASKRFEIGGTDLTNLCAQGLKKSNPSVNHALKXYEGLANQEACFFQDGQVITIEKKTLXSGRSFVSNEQALALEKEGFVDGEAMIRPRRRGLEDYGIVHQLITSVSNVASEYQKQVLENTMLCGGTVSMTGFEDRFQREANLSASAIRPTLVKAPEYMPEDLARHSAWLGGAILAKVVFPQNQHVTKGDYDETGPSIVHKKCF

SEQ ID NO: 11014 - protein, 265 aa, Triticum aestivum
  unsure (1)..(265): unsure at all Xaa locations
  Clone ID: TRIAE-23APR03-C95862_1.p
SRDHATHSRPRTRRNGVHARTSSAASPPTAVDPDQPRPPPPPLALRCSCSPXQLGRASTVSPRAFFGRADLDGLLQRAWRGANAGAERLSFEARQAAQRLDGRYSISRRVAEAARAARERAAEIDAELGVGRRWRSFSVDFSRSWPRYRRELSDFLATPIGRALSTLTFVWLALSGWLFRIFIFSTFVLPFAAPLLLGTFANRVAIEGSCPACKRRFVGYRNQVIRCMNCQNIVWQPNSRSSGGGGGGGSRSSGPDYIDVEFEEK

SEQ ID NO: 11015 - protein, 317 aa, Triticum aestivum
  Clone ID: TRIAE-23APR03-C9590_1.p
MASSTTAARADAAPPGLKEGIAGLYDESSGLWESIWGEHMHHGFYDSGEAASMSDHRRAQIRMIEEALAFAAVPDDPTNKPKTIVDVGCGIGGSSRYLANKYGAQCSGITLSPVQAERGNALAAVQGLSDKASFQVADALEQPFPDGQFDLVWSMESGEHMPNKQKFVSELARVAAPGATIIIVTWCHRNLAPSEDSLKPDELNLLKKICDAYYLPDWCSPSDYVKIAESLSLEDIKTADWSENVAPFWPAVIQSALTWKGLTSLLRSGWKTIKGALVMPLMIQGYKKGLIKFSIITCRKPQAAIEGEPEAASPSVE

SEQ ID NO: 11016 - protein, 531 aa, Triticum aestivum
  unsure (1)..(531): unsure at all Xaa locations
  Clone ID: TRIAE-23APR03-C95_1.p
MATCKAWISLLLALAXVVLSAPSARAQEAAASAEPAAADEAVATQHADNLHDDIAKHPFILVEFYALWCGHXKSLAPEYEXKAAQLLSKHDPAXLSLLKVDANDXMKNKXPLSGQRTRVQGFPNPQRIFQGTGGERNIPCEYXGPREAEGIVEYLKKQVGPASKEIKAPEDATYLEDGKIHIVGVFTEFSGTEFTNFLEVAEKLRSDYDFGHTVHANHLPRGDAAVERPLVRLFKPFDELVVDSKDFDVSALEKFIDASSTPKVVTFDKNPDNHPYLLKFFQTNAPKAMLFLNFSTGPFESFKSAYYGAVEEFSGKDVKFLIGDIEASQGAFQYFGLKEDQAPLILIQDSDSKKFLKEQVEAGXQIVAWLKXDYFDGKLTPFXRKSEPIPRGXENEPVKVVVADNVHDVVFKSGKNVLIXFYAPWCGHCKKLAPILDEAAATLQSEEDVVIAKMDATANXVPSEFDQLEWLPTXYFVTSQAETKVSYEGGRTADEIVDYIKKNKETAGQAAAADTEKAAEPAATEPLKDEL

SEQ ID NO: 11017 - protein, 320 aa, Triticum aestivum
  Clone ID: TRIAE-23APR03-C963_2.p
MKVEEQTVVGGGGGGLWGLAGRPCDTCAVDAARLYCRSDGAYLCAGCDARAHGAGSRHARVWLCEVCEHAPAAVTCRADAAALCATCDADIHSANPLASRHERLPVTPFFGALADPPQPAPSPSSAAATQEDADDDGSNEAEAASWLLPEPGDSPEDSTATFFADSDAYLDLDFVRSMDGIKAIGVPVAPSELDVAGGALFYPEHSMNHSMSTSEVAVVPDALSAGGAPAPAPSVAVVASKGKEREARLMRYREKRKNRRFQKTIRYASRKAYAETRPRIKGRFAKRTAEDDALERDGPFSPASSAHLASDGDYGVVPSF

SEQ ID NO: 11018 - protein, 563 aa, Triticum aestivum
  unsure (1)..(563): unsure at all Xaa locations
  Clone ID: TRIAE-23APR03-C96635_1.p
MLPPGAELELHERTPSSSSRHARLTGALLSMQASSRSSSMERTSQWLSSQDVQTDLVVRVAGAAFPLHKAVMVPKCGYIRKAVAVATRPDPAATVEIELDGLPGGADAFEKAARYCYGANFEISARNAAALLCAAAFLDMQPADGGLARRVEEFLAQAGLRTLPNAIAVLRSCEGPLLTAAEELGVARRAADAVALRICNEVLFPTRSPPEWWASELAALSPVSFHRVFTALRCRRAGPEVLVAAATAYAELLLADGKASDHRALLESVVAVLPSADDAPLPXSXFLCRLLHDAVTTEASAKTCRDLELRLAAVLDQATAGDLLAFAFDGAGERVINTESLRRVIAAFVERESGAGRNRRASLSGAAALGAGALQKVAKMVDEVAAEIATDESLPISKFVGVAGAVPKDARXPPHDCLYRAVDIYLKAHPKLDEIEREKVCSVMDTLKLSYTARIHASQNKRLPLQAVLSALYYDQLKLRSAGVGHDDEDSDARSEAGSARMQAKADAALARENEALRSELARMRAHMSSGVQQSKGSGSRTAARRRRWRGRKRASSGRCRAR

SEQ ID NO: 11019 - protein, 386 aa, Triticum aestivum
  unsure (1)..(386): unsure at all Xaa locations
  Clone ID: TRIAE-23APR03-C97090_1.p
MSETETAAAAATSTERKPRRLRGHKKGAVTCCVASSARPGVVASSGEDGCLCWFDLRTKDVLLTIEAANKPISSICFKSGNEDHVYVSAGNEILSFDIRMGSQSKPLETYNYNRDEINQIAVSSKGYLAAADDSGDVKIVNTXSKCLYKRLREAHTSICSSVQFIPWRPWTAITGGLDSKLAVWDFSKGRTLFSIDYGSPELQNSSSSGSTGQCLNPAFVHSVAVSEEGILGGLYKVCAVARGDGAVDVVDLEYELAPAKSKGPSRARGSTMSSKTTDLGDGSNNQCQRRRIHLDYSMGGHTAAVSCVAFSAFGEKGKLLVSGGNDASLKVWDWSKGFSPETSSNSELVLDIDVKKKVNWLCTAPTDSDNLIVCDTSKVVKVYNFL

SEQ ID NO: 11020 - protein, 381 aa, Triticum aestivum
  unsure (1)..(381): unsure at all Xaa locations
  Clone ID: TRIAE-23APR03-C9715_1.p
MGAGRLLHLVRAPAAAPAGPLRGHPQPHSRVRLPATPAAGMRRVAVSCSGSGSGSGPADEEGMTYKGAGVDIDAGTELVRRIRKLAPGIGGFGGLYPHGDEYLVAGTDGVGTKLKLAFETGIHDTIGIDLVAMSVNDIVTSGAKPLFFLDYYATSKLDVDLAEKVIKGIVDGCQQSNCILLGGETAEMPDFYKEGEYDLSGFAVGAVKKDKVIDGKNIVEGXDVLIGLPSSGVHSNGFSLARRVLDKSGLSLTDPLPRNDGVTTTVGEALMAPTVIYVKQVLDIISKGGVKGLAHITXGGGFTDNIPRVFPKGLGAKIVTGSWQVLPVFEWLQQVLRTDNMXFGMVLVLSKEAXADRILGKKSSPAYRIGEVIQGEGVQYV

SEQ ID NO: 11021 - protein, 343 aa, Triticum aestivum
  Clone ID: TRIAE-23APR03-C97316_1.p
MARAAAANLRGLVGIAAAGRRRVTASVAPPRASPGGRAFRAVASGSGGRTTPESSSSSSPALPQLQPRRGLATRRAVLRNLISGGLESEDGKLSCGYSSFKGRRPTMEDRYDVKFAKMKGQSVSLFGVFDGHAGALAAEYLKEHLLDNLIEHPQFLRNPKLALKTTFLKTDADFLESVTTPYREDGSTALAAVLVGDQIYVANVGDSRAIALKGGKAIPLSDDHKPNLKDERTRIENAGGGVSYDGFTWRVDGILAMSRAFGNRSLKNYVIAEPDIQETQVSSDLEYLVLATDGLWDVVQNEDVISLMRATDEPEVAAVKLTEMAHSRHSSDNITCIVVGFHH

SEQ ID NO: 11022 - protein, 181 aa, Triticum aestivum
  unsure (1)..(181): unsure at all Xaa locations
  Clone ID: TRIAE-23APR03-C973_1.p
PRPLTSAGEDRPRHALPAPPSRLSGPPLPAGASRGAAPSPPTPCPAIPPPRAVPSAPPATPPAAQASSTSGDHGGRARRPPXPSTPRRSFSGTAAGALLTPWTGCRGRGTWACTPPSERALKLGQPPAAPRDPSTGASGCWGRRCRRRCRRIGWAPLRHLGPSSGTLPRGIEDTHPGVAHW

SEQ ID NO: 11023 - protein, 596 aa, Triticum aestivum
  Clone ID: TRIAE-23APR03-C97516_1.p
MGTSSGANFHQQPPPQGMLPPRHGARAPSLQTSLSLASSEQVGSPEMQEPVSNSDQGHDSATESASSRETWPVEPEHSNAAAASSGGAVKKVEMEKDIRNGIPKLQVIRGSSRIDRVSLREIARERVDLVVEKMKVMPEEHLEEIKNELRSILEGTGGSHHIEEFLYLQKFVQGRGDLTPTMLSMAHHVQLEILVAIKTGIQAFLHPSVTIPQSHLVEVFLYKRCRNIACQSALPAEECRCNVCANRNGFCNLCMCVICNKFDFEVNTCRWVGCDFCSHWTHTDCAIRVGQIGTGQSIKSGTGHAEMLFRCQACQKTSELFGWVKDVFQQCAPGWDRDALVRELEFVCKIFRLSEDPKGRNLFRKCANLIERLRNSSPDSVNPRMILHALRELEMDSPKSSENEESGRLITPQEACNRIAEVVQEAVRKMELVAEEKMGLYKKARTAVEACDRELDEKARQVQEFKAERLRKKQQVEELESIVRLKQAEAEMFQLKASEARQEAERLQSIALAKSERAEQDYASLYLKRRLEEAEAEKQFLFEKIKLQDGHRPPQASSSVPADSSQAPSQALMLSKIQDLLKNVRTMPTKSEAHSK

SEQ ID NO: 11024 - protein, 208 aa, Triticum aestivum
  Clone ID: TRIAE-23APR03-C9756_1.p
MAVPGGRNGLVEDDDVADQAGAFVAPSDDEEAPLPPHLQALSDAAQNGDVNALRTALDNYGGSIDDPVEDGDTVLHLACLYGHLPCVQLLLERGANLECKDEEGAIPLHDACAGGFTEIVQYILSFAANAEGCATRMLNTVDAEGDTPLHHAARGEHMDTVKLLLEAGACPKKENAYGQAAAEMADQDTEVRALLTAKQVEASIHMAD

SEQ ID NO: 11025 - protein, 421 aa, Triticum aestivum
  Clone ID: TRIAE-23APR03-C9764_1.p
MPLVQIVPTRDIPDRYGWPTSQTPPKGIRYRISRTDRMPRRCPCSPIPSRQVRCTSRPRGALAVTSPAAAMTSPASTSSWFSGIVRTASGNPPSSAMPPAGGVTSAPVSLPDTPAAVSGKGGVVAPVATTGVGARRKQLQGTLFKYGPKSAQVAFRTGDFTRQVIFIGGLADGLLATDYLEPLSLALEVEKWSLVQPLLSSSYTGYGISTLEQDALELDQLIGYLINKDNSEGVILLGHSTGCQDIIHYMRTNFACSKAVSGVILQAPVSDREYRATLPETGEMIDLAAKMISAGRGMDLMPREANSDAPITAYRFHSLCAYMGDDDMFSSDLSEDQLKQRLGHMSTTQCLVVFSMADEYVPEYVDKKALVDRLSRALGDSEKVEIKWGNHALSNRVQEAVEVIVDFVKREGPKGWDDPWS

SEQ ID NO: 11026 - protein, 471 aa, Triticum aestivum
  Clone ID: TRIAE-23APR03-C97673_1.p
MAASPPLRHVAMLPFMAKGHAMPLLHLAHLLLGRRLASAVTFFTTPRNAPFIRAGLAGAGAGAAVVELPFPSEQDAPQSTDELPSSTSLVDFVTAVAALQPAFADALAKIEPRPDLLVHDGFLRWAKDIADELGMPRLVTLGFGGFATYVNRAVTAHRPHARVSSPSERFPVHGVPDLRLTKADLNPPFDDPEPSGPHWDLICKNRISMYSSRGIIVNSFHELESIYIDLWNREFDVKMWPIGPLCLAASEPAVPTKDDHEISEWLDSRLAMGRPVLYVAFGSQAELSRAQLEEIAVGLDSSGVDFLWVVRSKWLNPDDRFNQRFGDRGKVVEGFINQLGVLGHKSVKGFFTHCGWNSVLESITMGVPILAFPMAAEQKLNAKFVVDVIHVGLRVRPKEDASKGGSGLVMGGDVQALARELILGEEGKRAAARAGELSMSSRKTMDIGGSSFENLARMVQEVSETHANNGE

SEQ ID NO: 11027 - protein, 194 aa, Triticum aestivum
  Clone ID: TRIAE-23APR03-C97809_1.p
MAAEDVEFVDYERDDGDEEDGGMEDGEVSARALPVPHIAAPAVPRTSRGRFVGRSRSVIASTRDRFDSLPFAGTSAHGGPQRSIEGWIIIVSGVKEDAEESDLYDAFAEFGEVKDLHLNLERRTGYGKGYALVEYGCFEEAQTAIRSMNGTQLLTKTIHVDWAFNRGPIQNVTSARPAQRRSRTPPRRLAAMTY

SEQ ID NO: 11028 - protein, 251 aa, Triticum aestivum
  unsure (1)..(251): unsure at all Xaa locations
  Clone ID: TRIAE-23APR03-C9784_1.p
SVLERARERRCGPRLVLFGDSTRRXQFFARGGGGAAAGGSASAAARVFVGLSGLSGHNKVQGAEGGGARGVRGRRPPDGGDPAALTVLRRPYPTTRTRNTRVRLGEFQDXRHSICASARNKWPSAANILITPPPIHEPARIXEDIYGDNDPSRQPERTNEAAGTYAQACITVAKELGHPVIDIWTQMQQCPDWQTSALSDGLHFTPSGNKILFDEVLKTLESVGFSQHSLRSDLPLFHEIDPKDPLKAFEI

SEQ ID NO: 11029 - protein, 507 aa, Triticum aestivum
  unsure (1)..(507): unsure at all Xaa locations
  Clone ID: TRIAE-23APR03-C98395_1.p
PTPGPRSQKPKQSKLHTQALPHRSSRAMALLLLATAASAAVAGASXARRPEADLVTGLPGQPEVGFKHYAGYVDVGTGGDKALFYWFFEAEKEPEKKPLTLWLNGGPGCSSIAYGAAQELGPFLVRGYGANLTRNAYAWNKAVNLLFLEAPVGVGFSYTNKTADLGRLGDRVTAQDSHTFLLNWLAKFPEFKGRDFYIAGESYAGHYVPQLADLIYEGNKAAGRGRIINLKGFIIGNAVLNDETDQLGMVEYAWSHAIISDELHSAVTRECDYFREEADGGKPGKGCSSAVRAFMGAFDDIDIYSIYTPTCLSPSAGPGSTAPRPSRLVAAPRLFSQHEAWHMMRRAPAGYDPCTEAYVTRYFNRQDVQRALHANRXTGLKYPYSPCSAVISKWNDSPATVLPVLKKLMAAGLRVWVYSGDTDGRVPVTSTRYSVNAMKLRARARSGWRAWFYRQQVAGWAVEYEEGLTLVTVRGAGHQVPLFAPDRSLAMLYHFLRGQPLPAAAPR

SEQ ID NO: 11030 - protein, 253 aa, Triticum aestivum
  unsure (1)..(253): unsure at all Xaa locations
  Clone ID: TRIAE-23APR03-C983_1.p
VDHHPPHHQQQHQLLQVVRGGGGGGGAGSDSSSANGQPNRRRRNGFNQGRRRMGVRPRRTDREDSVRRTVYVSDIDQHVTEQKLAEVFSNCGQVVDCRICGDPNSVMRFAFIEFADDVGARAALTLGGTILGFYPVRVLPSKTAILPVNPKFLPLTEEEKEIXRGRYRIGIQDKNVPEDVVKNFFEGICGEVARLRLLGDYVHATCIAFVEFVQAEGAILALNCSGMLLGSLPVRVSPSKTPVRPRSPRAMSH

SEQ ID NO: 11031 - protein, 417 aa, Triticum aestivum
  Clone ID: TRIAE-23APR03-C986_1.p
VSRSLPSSCEQESRLAYMTYHLLEITRTKRPSGVLAIEHDGIAVAAVLAKRPKSEDSHDAVPVDCQGGNQGYSDSSTLISSIGRDNSINCLARCSRSDYGSIASLSRNFRSLVRDGGLYRERRRLGIAEHWVYFSCNVQEWEAYDPYRERWMTLPRMPPNECFMCSDKESLAVGTELLVFGKEILSHIGLSYSILTNSWSRGVEMNAPRCLFGSASFGEKAIIAGGMDSFGSVLSSAELYNSETKSWVTLPSMNKRRRMCSGVFMDGKFYVIGGMASNTEVLTCGEEYDLEKGTWRLIENMSEGLNGASGAPPLVAVVDNELYAAQYAGKLVRKYNKSDNTWTTLGELPERPEAVNGWGIAFRGCGERLLVIGGPRVLGGGMIELHSWIPREGPLQWNMIGSKPSGNFVYNCAVMGC

SEQ ID NO: 11032 - protein, 513 aa, Triticum aestivum
  Clone ID: TRIAE-23APR03-C98906_1.p
MAGEGEEDEAAEIELQLEQHLEEQRSSLAAVDEALAADASNADLLEVHGELLSAIKDAEEGLLHLKRSRLVKQIDEIFPNQESASLSTEAAIEPLDPHDVEPQPLEPQEFSVGSKCRFRHNDGRWYNGCILGLEGSGNARVSFLTPTSEKMSMCKFFLQQRCRFANNCRLSHGVVIPTSSLKRFTPTAWRQSLAGSSILAASGHHSGLWRRAELESWDDELKRGQVVFQDDGSTATLPGDSLSIPEYADVSGEDDERGSSEDESELSEDGDQEDESIHQGLGRLETTNLTGVQSETVIFAKWEQHTRGVASKMMAKMGYREGMGLGVSGQGMLDPIPVKVLPAKQSLDHAVAATTGEDGRSIHREKDKKRSRGGQRKRDRKFAELTRAAKAEEAERSVFSFMNSQLVSQDTSEGSSAAKARKESPSGQANGHPKKEDNRRSLLAYDDEVKELRSQVGRLEEMVQRNRKDKAVHDAASRKLEQTRKALADAEATHASATNAVARKEKEKKWLKF

SEQ ID NO: 11033 - protein, 309 aa, Triticum aestivum
  Clone ID: TRIAE-23APR03-C98_1012.p
AVSSLVPAATTTTTTPPPHHTCSSPSAPPLPPIAIKPPAPLPPPLPPSSPSPSCYSPVHVLLLPMSPPLELDYIGLSAAAGGRPDDDLKGTELRLGLPGCESPDRRPVAATTTLELLPAKGAKRGFSDEVVPPAPISAAGKGKEASGDEKDKKVAAPPQPAAKAQVVGWPPVRSYRKNTMATTTNQLKSSKEDSDTKQGQEFLYVKVSMDGAPYLRKVDLKTYKNYKDMVVALGKMFIGFRTGKDGASENRKDGEYVMTYEDKDGDWMLVGDVPWEMFTEACRRIRVMKSSDVVGLGVTRAGVKSKNKN

SEQ ID NO: 11034 - protein, 142 aa, Triticum aestivum
  Clone ID: TRIAE-23APR03-C98_1020.p
AGSGPYPPPPAFRLQAEGLRYHHQLSRHIAQLGRIEAMASRLLAAASSSSASSSPLARLISSRRMAGAADHHGSTKVNMWQEPLNPGNWKEEHFVLASLAMWGAYYIWWIEGICVRNTEPTNRRQAHPASTGHDYPCTPKPL

SEQ ID NO: 11035 - protein, 376 aa, Triticum aestivum
  Clone ID: TRIAE-23APR03-C98_1036.p
MAPCATAGAQMLAARPCVSASQSMLTSRPAVSRIDLTLVAGSFANCPRISCSRSLGSSRSGAVAVRAVSGEGSSSGLPIDLRGKRAFIAGVADDNGYGWAIAKALAAAGAEILVGTWVPALNIFETSLRRGKFDESRKLPDGSLMEIVKVYPLDAVYDSPEDVPEDVKTNKRYAGSSNWTVKEAAELVKKEYGSIDILVHSLANGPEVTKPLLETSRSGYLAAISASSYSFVSLLKHFLPIMNPGGASISLTYIASERTIPGYGGGMSSAKAALESDTKVLAFEAGRKGKIRVNTISAGPLGSRAAKAIGFIEKMIEYSYVNAPLQKELLADEVGNTAAFLVSPLASAITGSTVYVDNGLNTMGLAVDSPTVSSLL

SEQ ID NO: 11036 - protein, 665 aa, Triticum aestivum
  Clone ID: TRIAE-23APR03-C98_1037.p
MDRLRGSALLLGVLLAGSLFALCAAKEEAKKLGTVIGIDLGTTYSCVGVYKNGHVEIIANDQGNRITPSWVGFTDGERLIGEAAKNQAAVNPERTVFDVKRLIGRKFEDKEVQRDMKLVPYKIVNKEGKPYIQVKIKDGETKVFSPEEISAMILGKMKETAEAYLGKKINDAVVTVPAYFNDAQRQATKDAGVIAGLNVARIINEPTAAAIAYGLDKRGGEKNILVFDLGGGTFDVSILTIDNGVFEVLATNGDTHLGGEDFDHRIMDYFIKLIKKKHGKDISKDNRALGKLRREAERAKRALSNQHQVRVEIESLFDGTDFSEPLTRARFEELNNDLFRKTMGPVKKAMDDAGLEKTQIHEIVLVGGSTRIPKVQQLLRDYFDGKEPNKGVNPDEAVAFGAAVQGSILSGEGGDETKDILLLDVAPLTLGIETVGGVMTKLIPRNTVIPTKKSQVFTTYQDQQTTVSIQVFEGERSMTKDCRLLGKFDLSGIPPAPRGTPQIEVTFEVDANGILNVKAEDKGTGKSEKITITNEKGRLSQEEIDRMVKEAEEFAEEDKKVKERIDARNQLETYVYNMKNTVGDKDKLADKLESEEKEKVEEALKEALEWLDENQTAEKEDYEEKLKEVEAVCNPIVSAVYQRSGGAPGGEGADGGVDDEDHDEL

SEQ ID NO: 11037 - protein, 345 aa, Triticum aestivum
  Clone ID: TRIAE-23APR03-C98_1039.p
MGKKKKRVEKVFCYYCDREFDDEKILVQHQKAKHFKCHVCHKKLSTAGGMAIHVLQVHKESVTKVPNAKPERDSTEIEIFGMQGIPSDVLAAHYGEEEDPSSKVAKVEVPTIRPPIMPNYPLGMPFPPRPYGAARPMYNPAMMVRPPIWPLQQPQPWFAQQPPVSVPPMMAGQAPQQPLFPIQNMPNPMMTSAPANLLQTSYAMPTTGVPSPVAPQASQLLFPVNTSGNGAANSSFSSSISPATIAANSPASVGTAGYGYVANNHGTGGPAIGQPPAPATNSKTSATQPATSEVYLVWDDEAMSMEERRLALPMYQVHDETSQMSSVDAAFDRRISDITFSRQLT

SEQ ID NO: 11038 - protein, 427 aa, Triticum aestivum
  unsure (1)..(427): unsure at all Xaa locations
  Clone ID: TRIAE-23APR03-C98_1052.p
MAAASFTAAKFLAPAAARSGGDRARPFPAPSAFSMRSLRHRPARRLSSVLAVSSDVLKAAPAAAAYPAVTREEALELYEDMILGRNFEDMCAQMYYRGKMFGFVHLYNXQEAVSTCFIKQLNQPDCVVSTYRDHVHALSKGVPXARAVMAELFGKATGCCRGQGGSMHMFSEPHNLLGGFAFIGEGIPVATGAAFAAKYRHEVLKQSSPDGLDVTLAFFGDGTCNNGQFFECLNMAPACXKLPIYFLLWRTTLWAIGNFSXLGATSDPEDLXRRGPAFGMPGVHVDGMDVLKVREVAKEAIDRARRGEGPTLVECETYRFRGHSLADPDELRXRPDEKSHYAARDPITSLKKYIIEQNLASEAELKNIEKKIDDVVEEAVEFADASPLPPRSQLLENVFADPKGFGIGPDGKYRCEDPKFTQGTAQV

SEQ ID NO: 11039 - protein, 431 aa, Triticum aestivum
  Clone ID: TRIAE-23APR03-C98_1054.p
MAGTVPKLAAPRPAAAGPLPSQPLRSAALASAPSARRFRVSLAARARSPVIAMASAKEGNGAVTKRTTLHDLYEQQGQSPWYDNLCRPVTDLLPYIANGVRGVTSNPTIFQKAISSSNAYDGQFKELISAGKDAESAYWELVIKDIQDACKLFEPIYDETDGADGYVSVEVSPRLANDTQGTVEAAKWLHKVVNRPNVYIKIPATAECVPSIKEVIANGISVNVTLIFSVARYEAVIDAYLDGLEASGLSDLSRVTSVASFFVSRVDSLIDKMLEKIGTPEALALRGKAAVAQAKIANQLYLKKFSGPRWEALVKKGAKKQRLLWASTSVKNPAYLDTLYVDPLIGPDTVSTMPDQALDAFIDHGTVARTIDANVSEAEGIYSALEKLGIDWEEVGKQLEHEGVSSFKGSFDSLLTSLEEKGNALKTAANL

SEQ ID NO: 11040 - protein, 494 aa, Triticum aestivum
  Clone ID: TRIAE-23APR03-C98_1079.p
MAAAVADAAVPAAARANDAGAGCCAAKGPGYATPREAMEKGPREGLLYVTCVYNGTGIDKPDYLATVDVDPNSATYSQVIHRLPATHIGDELHHSGWNACSSCHGDPSTSRRFLILPSLLSGRVYVVDTAKDPRAPALHTVVQAEDIAEKTGLGFPHTSHCLATGDIMISCLGDKEGNAAGNGFLLLDSEFNVKGRWEKPGHSPLFGYDFWYQPRHKTMISSSWGAPAAFRTGFDLQHVQDGLYGRHLHVYDWPGGELKQTLDLGSTGLLPLEVRFLHDPSKDTGYVGCALTSNMVRFFKTADGSWSHEVAISIEPLKVRNWMLPEMPGLITDFVISLDDRYLYLVNWLHGDIRQYNIEDPAKPVLAGQVFVGGLLQKGSDVVYVTDDDKEEQYAVPQVKGNRLRGGPQMIQLSLDGKRVYVTNSLFSRWDEQFYGPDLLKKGSHMLQIDVDTEEGGLAVNPNFFVDFGTEPEGPSLAHEMRYPGGDCTSDIWI

SEQ ID NO: 11041 - protein, 432 aa, Triticum aestivum
  unsure (1)..(432): unsure at all Xaa locations
  Clone ID: TRIAE-23APR03-C98_1115.p
MAGTVPKLAAPRPAAAGPLPSQSLRSAALAFAPSARRFRVSLAARARSPFIAMASAKEGNGAVTKRTTLHDLYEQQGQSPWYDNLCRPVTDLLPYIANGVRXGVTSNPTIFQKAISSSNAYDGQFKELISAGKDAESAYWELVIKDIQDACKLFEPIYDETDGADGYVSVEVSPRLANDTQGTVEAAKWLHKVVNRPNVYIKIPATAECVPSIKEVIANGISVNVTLIFSVARYEAVIDAYLDGLEASGLSDLSRVTSVASFFVSRVDSLIDKMLEKIGTPEALALRGKAAVAQAKIANQLYLKKFSGPRWEALVKKGAKKQRLLWASTSVKNPAYLDTLYVDPLIGPDTVSTMPDQALDAFIDHGTVARTIDANVSEAEGIYSALEKLGIDWEEVGKQLEHEGVSSFKGSFDSLLTSLEEKGNALKTAANL

SEQ ID NO: 11042 - protein, 235 aa, Triticum aestivum
  Clone ID: TRIAE-23APR03-C98_1124.p
INSSRQSKTLTPFSLTDKGANSRCGVITLTKVYDSRIGNKARAAQFYVYGVIDFQRFPPPPPIFGPLEPRAEFGTSAAAAAAADAEAAAASSSPPRRCRPTRPSASSRSWPRSSARTAPSPTGSACGPTTPSGTTRSAGTGAAPSSGSRSGPPGRGVVEPWLKSYLHFVLWTFQCLLCKLGSDSRICLCYQFRRVMRILLVLWCTHVTMLCQVKNLCYMPPLLNLSPWLNFGSNG

SEQ ID NO: 11043 - protein, 461 aa, Triticum aestivum
  unsure (1)..(461): unsure at all Xaa locations
  Clone ID: TRIAE-23APR03-C98_1136.p
MGSPQAVAAQCPEGHAFRRAGTGRADDGHRGHLGPPGFGRRRGRQQSTPRAERRTSKSRSAYGGGASPAPIRFPVDAAANSTVLLPIKGNVFPGGQYYTSIFVGNPPRPYFLDVDTGSDLTWIQCDAPCTNCAQGPHPLYKPAKEKIVPPRDLLCQELQGDQNYCETCKQCDYEIEYADRSSSMGVLAKDDMHLIATNGGKEKLDFVFGCAYDQQGQLLSSPAKTDGILGLSSAAISLPSQLASKGIISNIFGHCITRETNGGGYXFLGDDYVPRWGMTWAPIRGGPDNLYHTEAQKVNYGDQELSMHGHAGNSVQVIFDSGSSYTYLPEEMYKNLIDAIKDDSPSFVQDSSDTTLPLCWKADFSVRSFFKPLNLHFGRRWFVVPKTFTIVPDDYLIISEKGNVCLGLLNGTEINHGSTIIVGDVSLRGKLVVYDNERRQIGWANSECTKPQSQKGFPFFL

SEQ ID NO: 11044 - protein, 116 aa, Triticum aestivum
  Clone ID: TRIAE-23APR03-C98_476.p
LLLCGQRLAAHRVRPRLAPLGSRLGGAEMKITALVVLKPSAGGTEGSSSSGGQGSEALVLANATDVRHFGFFRHGAAHEFIIFVARTVAQRTQPGQRQSVQHEGHWKSFVWRGKPS

SEQ ID NO: 11045 - protein, 136 aa, Triticum aestivum
  unsure (1)..(136): unsure at all Xaa locations
  Clone ID: TRIAE-23APR03-C98_481.p
RGTHPVPVKGVISTNSTDNSFVCGKKNPQSLERVRSIRSIGQAGLTAHLDVHGLLVGLELAPCEGSQEKTPTGSDQEDQEDLATKRRGLAPLPLPPXSFSRFLSXXILDFCALPPPMVVDSSTRRETMLFCFGGNL

SEQ ID NO: 11046 - protein, 173 aa, Triticum aestivum
  unsure (1)..(173): unsure at all Xaa locations
  Clone ID: TRIAE-23APR03-C98_556.p
MAKPSQSRPLFVFPVAAVLAAAFLLPLARSDASGPTPTATAYDELRLRGFPRGLLPANVRGYTLDAGSGDFAVDLDSSCRIVLPAGSYLANFNDHLTGHLDDRRISGLSGIRVRAFFRWWSITGIRADGDELVFEVGSVSAKFPARXHFNASLECPAKADSVSTITRNSWRAS

SEQ ID NO: 11047 - protein, 220 aa, Triticum aestivum
  unsure (1)..(220): unsure at all Xaa locations
  Clone ID: TRIAE-23APR03-C98_567.p
MAPTSKMALGIKRASRSHTYHRRGLRAIKAKHGGALPKAEKPAAIAEPKFYPADDVKPRTVSTRKPHPTKLRSTITPGXTVLILLAGRYMGKRVVFLKQLQSGLLLITGPFKINGVPIRRVNQAYVIATSTKVDISGVNVEKFDDKYFARDKKTRAKKTEGELFETEKETTKNLPEFKKDDQKAIDAELIKAIEAVPDLKNYLGARFSLRDGDKPHEMTF

SEQ ID NO: 11048 - protein, 103 aa, Triticum aestivum
  Clone ID: TRIAE-23APR03-C98_607.p
MSTVTRAYLDQKLAAARRCSREAAVAGAKAAAVATIAAAVPTLASVRMLPWARAHLNPTGQALIISTVAGMAYFIVADKTILSMARKHSFDDAPDHLKNTSFH

SEQ ID NO: 11049 - protein, 441 aa, Triticum aestivum
  Clone ID: TRIAE-23APR03-C98_665.p
MAAAPFVYCAPSGDGGTDENALLMVALHGNLGRLKDIVNSLTRGNGGPSAIFSFNKDGVGALHGAACGGHLEVCKYLVEDLGGDVNAPGIGSVALGATPFMMSAQSGDAPTVKYFLDHGGDLMKADDKGRTILHHAVSAGCCKVTEFLLSKGVPVDIDCGRGPPLFMAATNEQDKTLKILLDHHANPNIIISGATTPLLSALIYRSLKCMKLLIKAGADVNCKASTMTLLVFATMQGGYTNFIKFLLKAGADPNIPDDLGRLPIELAALRDCKEEVEMLLPLTTPIPTVPNWSIEGVISHVKNEDKKPMEQRHRERRQRLLKSQADTAFKLKEYKMASECYGLAIDHGESATLYANRSVCKLLLGDGEGSLSDALRCRMLRPDWAKACYRQAAAHMLLKEYKQACDALLDAQNLDPGNAEIERELRKARELMKNPPAEGEQ

SEQ ID NO: 11050 - protein, 491 aa, Triticum aestivum
  unsure (1)..(491): unsure at all Xaa locations
  Clone ID: TRIAE-23APR03-C98_696.p
MANAGDPASLPPSASPFSSTRALESVPFSSGNPRIEETRGVVLLHPDPPTAAAAASSSSSHLPAERKPQVFVPAVPNHMTYADFCRFCGSFVPHMLEMRIVRIDGAEDQYSVLIKFDTLSSTDSFYKHFNGKQFSSLEGDVSRIRFVEDVHYTQLIEHAHSSITSSAEQPTCPVCLERLDQDPGGILTTICNHSFHCSCISKWTGSSCPVCRYCQQQPEKSMCSVCGTSENLWICLICGNVGCGRYKGGHAIEHWKETEHCYSLELETQKVWDYAGDNYVHRLIQSKTDGKLVEYNCYGGHEADGICSICSGDAGMDEALLNSKVEAVMYXNVEEYNDLLTSQLDKQRNYYESLLSEVKEENEKEISAATSKAVSMMKLQKLQAKLDKCLEEKSFLDDINANLVKNQEMWKERVRKVQEREQAALKLKDEKIEKLEAELRDLIAHIECQNAVAAAPGSISSDIQGGTILPGPSAPSSSSSPVRPTKDRKRN

SEQ ID NO: 11051 - protein, 172 aa, Triticum aestivum
  Clone ID: TRIAE-23APR03-C98_717.p
MMLRAAGRRLIGAAGARPAALAGDSSTGAAALGAVAARRGYHERVVDHYSNPRNVGAFDKDDADVGTGLVGAPACGDVMKMQIRVDQASGRIVDACFKTFGCGSAIASSSVATEWVKGKQMEEVVAIKNTEIAKHLSLPPVKLHCSMLAEDAIKAAVKDYEAKKTKAAEADE

SEQ ID NO: 11052 - protein, 103 aa, Triticum aestivum
  Clone ID: TRIAE-23APR03-C98_745.p
MWTVTRAYLDQRLAAAKRCSREAAMAGAKAAAVATVAAAVPTLASVRMLPWARAHLNPTGQALIISTVAGMAYFIVADKTILSMARKHSFDDAPDHLKNTSFH

SEQ ID NO: 11053 - protein, 261 aa, Triticum aestivum
  unsure (1)..(261): unsure at all Xaa locations
  Clone ID: TRIAE-23APR03-C98_752.p
MWSFASNAIAGSIKKKVQPSKGSLSNHDCSDDDGSSCASREEGLECPICCESFNIVENVPYVLWCGHTMCKNCILGLQWAVVKFPTLPIQLPLFVSCPWCNLLSFRLVYKXGNLKFPRKNYFLLWMVENMNGDRAKFHSSGHEERQSVCPSSGGTSSSQHHRRTPTARAETSSSARDRNAAANTPNTASVSLQKLMVCFVQLTAKFPLVIMFLLIVXYAVPASAAVXLLYVLVTFLFALPSFLILYFAYPTLDWLVREIFT

SEQ ID NO: 11054 - protein, 295 aa, Triticum aestivum
  Clone ID: TRIAE-23APR03-C98_762.p
MATSTKLVALGFVVLVSIGFTNASRMLASSSSAGGGGGGGGGGGSSSGGGGSGWGHGAGGGGGLGYGENGGDASNKYNFAKGAGGGGGNGAGGGSEGGSGSGSGSGGGNGVGSSGSASAPSGSGYANADGQGGGGGAGGGADGSSGSGAGSGAGKGEAESGIATAPAVAPSAGGVSYSDAGGAGTGGGGGDGGVGGGNGAGGGQAASDDTTGGNASGSGSGNGGGQGGGVAQGPSMGVGSGSGIGGGQTGSTGSYGQGYATGTGAGTGGGGGGSNNGGFGNGGGSGSGSGSAGYP

SEQ ID NO: 11055 - protein, 447 aa, Triticum aestivum
  unsure (1)..(447): unsure at all Xaa locations
  Clone ID: TRIAE-23APR03-C98_776.p
MARNPCDIRLLLVAAAVAFIYIQVRLFSTQSSPSSSNSHSSDAGRLAEAEKCESQLHAMXDQVSAQQEKIAALEEMKVRQDEERVQLKILIQDLEKRSLQTLTNKNVVPVAAVVIMACNRPDYLQRTVESILKYQKAVASKFPLFISQDGTNGEVKKKALSYNQITFMQHXDLEPVRTERPGENVAYYKIANHYKWALDELFIKHDFRRVIILEDDMEIAPDFFDYFEAAAKLLDTDKTIMAVSSWNDNGQKQFVYDPKALYRSDFFPGLGWMLTKSTWMELSPKWPKAYWDDWVRLKEVHRDRQFIRPEVCRTYNFGEHGSSMGQFFDQYLKPIKLNDAHIDWNSEDLSYLKEDKFLTKFGKDVASATPVHGSDALLKAHNLDVDVRIQYDNQGDFERIARQFGIFEEWKDGVPRAAYKGVVVFRYKGSRRRIYLVGPDSLRQLGV

SEQ ID NO: 11056 - protein, 293 aa, Triticum aestivum
  unsure (1)..(293): unsure at all Xaa locations
  Clone ID: TRIAE-23APR03-C98_782.p
MATSTKLVALGFVVLVSIGFTNASRMLASSSSSGGGSGGGGGGSSNGTGSGWGHGAGGGGGLGYGESGGDANNKYNFAKGAGGGGGNGAGGGSQGGSGSGSGSGGGNGVGSSGSASAPSGSGYAXADGQGGGGGAGGGANGSSGSGAGSGAGKGEAESGIAIAPSVAPSAGGVSYSDAGGAGTGGGGGDGGSGGGNGAGGGQAASDDTTGGNANGSGSGNGGGQGGGVAQGPSMGVGSGSGIGGGQTGSTGSYGQGYATGTGAGMGGGGGGSNNGGFGNGGGSGSGSGSAGYP

SEQ ID NO: 11057 - protein, 136 aa, Triticum aestivum
  Clone ID: TRIAE-23APR03-C98_783.p
MARTKQTARKSTGGKAPRKQLATKAARKSAPATGGVKKPHRFRPGTVALREIRKYQKSTELLIRKLPFQRLVREIAQDFKTDLRFQSSAVSALQEAAEAYLVGLFEDTNLCAIHAKRVTIMPKDIQLARRIRGERA

SEQ ID NO: 11058 - protein, 472 aa, Triticum aestivum
  unsure (1)..(472): unsure at all Xaa locations
  Clone ID: TRIAE-23APR03-C98_787.p
KRKTSSVSTGDLFAVGGGRRRRGLRPHRLLLIFFSIFHPSDRPWLPPSPSPRPRSRCSRRPTATGTRRSAALSPSQEPGQSSVPWPSGSAASRRRAAAVRAPSGRSIEECEADAVAGKFPAPAAFVRPKAPDGTPEIRPLDMPKRPRRNRRSPALRAAFQETTISPANLVLPLFIHEGEEDAPIGAMPGCFRLGWQHGLLDEVYKARDVGVNSFVLFPKVPDALKSPTGIEAYNDNGLVPRTIRLLKDKFPDIIVYTDVALDPYSSDGHDGIVREDGVILNDETVYQLCKQAVSQARAGADVVSPSDMMDGRVGAIRSALDAEGFNDVSIMSYTAKYASSFYXPFREALDSNPRFGDKKTYQMNPANYREALLETAADEAEGADILLVKPGLPYLDIIRLLRDNSALPIAAYQVSXGEYSMIKAGGXLNMIDEEKVMMESLMCLRRAGADVILTYFARQAAAVLCGMGSAAK

SEQ ID NO: 11059 - protein, 274 aa, Triticum aestivum
  Clone ID: TRIAE-23APR03-C98_812.p
MADRGGERGVDRGGFGRGFGRGGRGDRGGRRGGRRGPRQEEEKWVPVTKLGRLVKEGRFTKMEEIYLHSLPVKEHQIVETLCPGLKDEVMKITPVQKQTRAGQRTRFKAFVVVGDSNGHVGLGVKCAKEVATAIRGAIILAKLSIVPVRRGYWGNKIGLPHTVPCKVTGKCGSVTVRMVPAPRGSGIVAARVPKKVLQFAGIDDVFTSSRGSTKTLGNFVKATFDCLMKTYGFLTPDFWRETTFTKAPYQEFTDILAKPTKALMLDAPAEKVEA

SEQ ID NO: 11060 - protein, 434 aa, Triticum aestivum
  Clone ID: TRIAE-23APR03-C98_820.p
MGAGAEPREEEPLEVEEGAGGKEEKAAVSCSICLDAVVAASAERSTARLQCGHEFHLDCIGSAFNAKGVMQCPNCRKIEKGNWLYANGSRPSHDINMDEWAHEEDLYDVSYSEMPFRFHWCPFGRLAQLPSFFEEGESPPPVTFHDFMGQHVFPENLSVSAAPGAHPCPYVAYLHPLPSLASSSSSHVPERTMDGSAYHDHWNHLAGPSDGRPLQTVQPTDFHHNHWAHLPHSYVQSNGNNGVTEQPGVPFGSMRAARVDGDSQRRGSVVSPSYFSNGSGSRSRAPNVPPLVPQFMRAHGNINEQYTQSSSSSLFAGAHRSGGMRPAPPPPQPENPTFCLFPPGSSGHSSMDTDEAGGSRFYAWERDRFAPYPLMPVDCETSWWSSQQSHGASESTPAPAPRRLFGQWIGLGRSSPENRSPEGSSYRQMHSPRM

SEQ ID NO: 11061 - protein, 498 aa, Triticum aestivum
  Clone ID: TRIAE-23APR03-C98_825.p
MGQRLLLLVTTCLWALSCAVPHHASSLDGLLRINLNKRSLTYESLAAAKAARQHGALRLKSSDLDSDIVPLVDYLNTQYYGVIGLGTPPQNFTVIFDTGSSNLWVPSSKCYFSIACYLHAKYKSSKSSTYKADGETCKITYGSGAISGFFSNDNVLVGDLVVKNQKFIETTRETSVSFIVGKFDGILGLGYPDISVGEAPPVWLSMQEQKLLADDVFSFWLNRDSDALSGGELVFGGMDPDHYKENHTYVPVSRKGYWQFNMGDLLIDGHSTGFCAKGCAAIVDSGTSLLAGPTAIVAQVNHAIGAEGIISMECKEVVSQYGEMILELLIAQTQPQKVCSQIGLCLFDGTHSVSNGIESVVGKENVGSDVMCTACEMAVVWIENQLRENKTKELILQYANQLCERLPSPNGESTVSCHEMSKMPNLAFTIANKTFVLTPEQYVVKLEQSGQTVCISGFMAFDIPPPRGPLWILGDVFMGAYHTVFDFGKDRIGFAESA

SEQ ID NO: 11062 - protein, 273 aa, Triticum aestivum
  unsure (1)..(273): unsure at all Xaa locations
  Clone ID: TRIAE-23APR03-C98_839.p
MVRLSNTMIGILNAITFLLSVPILAGGIWLRARADGTECERYLAAPVIVLGVFLMLVSIAGLVGACCRVTCLLWFYLVAMFLLIVVLLXITVFAFVVTHKGTGEAVSGRGFKEYRLGDYSTWLQRRVENDRNWNRIRGCLQDAKVCKSLEDRRDTVQQFMSSDLSPIQSGCCKPPISCGFTYVNGTQWSGPAKSTEPDCGAWSNDDGALCYGCQSCKAGVVATLKRNWKRSAIINIVFLVFIVIVYSVGCCAFRNNRRDHRNGGGYKQQGAYA

SEQ ID NO: 11063 - protein, 450 aa, Triticum aestivum
  unsure (1)..(450): unsure at all Xaa locations
  Clone ID: TRIAE-23APR03-C98_847.p
MPTITHYVLDPFLETGSLPNLQKLVPKPPPAAPLPPEKSSEKPIPVPVAPARTSTLPALYSTPESTPLPDSPSSFPGTWSPYLINHKRRGPGLIKTSSQGDVGSEGSLPKFPEGLPALPKRSEAFQVQESEFRFTQESDGVVNNGVKETLDGGVQKGKVTLFGQDEQDQPEFEFRHESPDALVRPVNVGRLVNNGMPRDGENDAFLEPQDSQSVTSNSEAEDAGGQGWWKPSSPYGTSAGTPGAEFYDAFEEISSDGATRSSRCIDDEYREMRLSMLTEIEGRKQAEEVAETWQKEWKKLSHHLSLIALSLPSPTVAENDDDTSADPGAELCQQITVSQLVAAAIARGIARVEVESEMESVISAKNFEIARLXSDRVQYYEAANREMSQRNQEAIEMSRQQRNKRKMRQKWFWGSVGIAVTLGTAAIAWSYMPASQSQAGDSNSTNTNSD

SEQ ID NO: 11064 - protein, 428 aa, Triticum aestivum
  Clone ID: TRIAE-23APR03-C98_849.p
MASTVPFSPAKVQMLQATNCHGHAPFGSCFAVPRTGPRPRSVAVRVSSEQEAAAAVRAPSGRSIEECEADAVAGRFPAPAAFVKPKAPDGTPEIRPLDMPKRPRRNRRSPALRAAFQETTISPANLVLPLVIHEGEEDAPIGAMPGCFRLGWQHGLLDEVYKARDVGVNSFVLFPKVPDALKSPTGVEAYNDNGLVPRTIRLLKDKFPDIIVYTDVALDPYSSDGHDGIVREDGVILNDETVYQLCKQAVSQARAGADVVSPSDMMDGRVGAIRSALDAEGFNDVSIMSYTAKYASSFYGPFREALDSNPRFGDKKTYQMNPANYREALLETAADEAEGADILLVKPGLPYLDIIRLLRDNSALPIAAYQVSGEYSMIKAGGALNMIDEEKVMMESLMCLRRAGADVILTYFARQAAAVLCGMGSAAK

SEQ ID NO: 11065 - protein, 504 aa, Triticum aestivum
  Clone ID: TRIAE-23APR03-C98_857.p
MATTSRLLLLLAAVCLLAGAADALRLPPDASFPGAQAERLIRALNLLPGASSGRGGKVGAGAEDVAPGQLLERRVTLPGLPEGVSDLGHHAGYYRLPNTHDARMFYFFFESRGKKEEPVVIWLTGGPGCSSELAVFYENGPFAIANNMSLVWNKFGWDKISNIIFVDQPTGTGFSYSSDDRDTRHDEAGVSNDLYDFLQVFFKKHPEFVKNDFFITGESYAGHYIPAFASRVHQGNKKNEGTHINLKGFAIGNGLTDPAIQYKAYTDYALDMNLIQKADYDRINKFIPPCEFAIKLCGTDGKASCMAAYMVCNTIFNSIMKLVGTKNYYDVRKECEGKLCYDFSNLEKFFGDKAVRQAIGVGDIEFVSCSTSVYQAMLTDWMRNLEVGIPALLEDGINVLIYAGEYDLICNWLGNSRWVHSMEWSGQKDFAKTAESSFLVDDAQAGVLKSHGALSFLKVHNAGHMVPMDQPKAALEMLRRFTQGKLKEAVPEEESSTTTFYTAM

SEQ ID NO: 11066 - protein, 196 aa, Triticum aestivum
  Clone ID: TRIAE-23APR03-C98_858.p
MVCIRQATIDDLLAMQACNLMCLPENYQMKYYFYHMLSWPQLLFVAEDYGGRIVGYVLAKMEEDPSEPCHGHITSLAVLRSHRKLGLATKLMSAAQAAMDQVFGAEYVSLHVRRSNRAAFNLYTSTLGYQIHDIEAKYYADGEDAYDMRKMLRQPVPKKHHHHHHAGGGCCSHDAPAAAAAGSSSTSASPEKKADS

SEQ ID NO: 11067 - protein, 499 aa, Triticum aestivum
  unsure (1)..(499): unsure at all Xaa locations
  Clone ID: TRIAE-23APR03-C98_867.p
MGQRLLLLVTTCLWALSCAVPHHASSRDGLLRINLNKKSLTHESLAAAKAARQHDALRLKSGNSDSDIVPLVDYLNTQYYGVIGLGTPPQNFTVIFDTGSSNLWVPSAKCYFSIACYLHPKYKSSKSSTYKADGETCKITYGSGAISGFFSNDNVLVGDLVVKNQKFIETTRETSFSFIVGKFDGILGLGYPDISVGKAPPVWLSMQDQKLLADDVFSFWLNRDSDALSGGELVFGGMDPDHYKGNHTYVPVSRKGYWQFNMGDLLIDGHSTGFCAKGCAAIVDSGTSLLAGPTAIVAQVNHAIGAEGIISTECKEVVSQYGEMILXLLIAQTQPQKVCSQIGLCLFDGTHSVSNGIESVVGKENVGSDVMCTACEMAVVWIENQLRENKTKELILQYANQLCERLPSPNGESTVSCHEMSKMPNLAFTIASKTFVLTPEQYVVKLEQSGQTVCISGFMAFDIPPPRGPLWILGDVFMGAYXHTVFDFGKDRIGFAESA

SEQ ID NO: 11068 - protein, 155 aa, Triticum aestivum
  Clone ID: TRIAE-23APR03-C98_872.p
MDASATVATGKGKKGAAGRKAGGPRKKSVSRSVKAGLQFPVSRIGRFLKKGRYAQRVGSGAPVYLAAVLEYLAAELLELAGNAAKDNKKSRIIPRHLLLAIRNDEELGKLLAGITIAHGGVIPNINPVLLPKKTAEKSPKEPKSPKKTAKSPKKA

SEQ ID NO: 11069 - protein, 292 aa, Triticum aestivum
  Clone ID: TRIAE-23APR03-C98_873.p
ATTTTTTTAPPHLLVSLCLSPPSYSNQTTSSTPPSSPPSSPSPSCYSPVHVLLLPMSPPLELDYIGLSAAAGGRPDDDLKGTELRLGLPGCESPDRRPVAATTTLDLLPAKGAKRGFSDEVVPPAPVSAAGKDKDASGDEKDKKVAAPPQPAAKAQVVGWPPVRSYRKSTMATTTNQLKSSKEDSDTKQGQEFLYVKVSMDGAPYLRKVDLKTYKNYKGMVVGLGKMFIGFRTGKDGEYVMTYEDKDGDWMLVGDVPWEMFTESCRRIRVMKSSDVIGLGVTRAGVKSKNKN

SEQ ID NO: 11070 - protein, 278 aa, Triticum aestivum
  Clone ID: TRIAE-23APR03-C98_876.p
MADRGGERGGDRGGERGGFGRGFGRGGRGDRGGRRGGRRGPRQEEEKWVPVTKLGRLVKEGRFTKMEELYLHSLPIKEHQIVEQLCPGLKDEVMKITPVQKQTRAGQRTRFKAFVVVGDSNGHVGLGVKCAKEVATAIRGAIILAKLSIVPVRRGYWGNKIGLPHTVPCKVTGKCGSVTVRMVPAPRGSGIVAARVPKKVLQFAGIDDVFTSSRGSTKTLGNFVKATFDCLMKTYGFLTPDFWRETTFTKAPYQEFTDILVKPTKALMLDAPAEKIEA

SEQ ID NO: 11071 - protein, 377 aa, Triticum aestivum
  unsure (1)..(377): unsure at all Xaa locations
  Clone ID: TRIAE-23APR03-C98_877.p
MLGAARRQLGSGPMLGQVLRRLRPAAAASTEAARGYSSAAKEITVRDALNSALDEEMSADPSVFLMGEEVGEYQGAYKITKGLLDKYGPDRVLDTPITEAGFTGIGVGAAYQGLRPVIEFMTFNFSMQAIDHIINSAAKSNYMSAGQINVPIVFRGPNGAAAGVGAQHSQCYAAWFAHVPGLKVLAPYSSEDARGLLKAAIRDPDPVVFLENELLYGESFPVSDEVLDSSFALPIGKAKIEREGKDVTITAFSKMVGYALQAAEILSKEGISAEVINLRSIRPLXDRAAINASVRKTNRLVTLEEXFPQHGVGAEICMSCCRRNFEYLDAPIEKIAGADVPMPYAANLERLAVPQVEDIVRAAKRACYRSSSMAANA

SEQ ID NO: 11072 - protein, 428 aa, Triticum aestivum
  Clone ID: TRIAE-23APR03-C98_881.p
MASTVPFSPAKVQMLKATNCHGHAAFGSCFAVPRTGPKHRSLAVRVSSEQEAAAAVRAPSGRSIEECEADAVAGRFPAPAAFVRPKAPDGTPEIRPLDMAKRPRRNRRSPALRAAFQETTISPANLVLPLFIHEGEEDAPIGAMPGCFRLGWQHGLLDEVYKARDVGVNSFVLFPKVPDALKSPTGVEAYNDNGLVPRTIRLLKDKFPDIIVYTDVALDPYSSDGHDGIVREDGVILNDETVYQLCKQAVSQARAGADVVSPSDMMDGRVGAIRSALDAEGFNDVSIMSYTAKYASSFYGPFREALDSNPRFGDKKTYQMNPANYREALLETAADEAEGADILLVKPGLPYLDIIRLLRDNSALPIAAYQVSGEYSMIKAGGALNMIDEEKVMMESLMCLRRAGADVILTYFARQAAVVLCGMGSAAK

SEQ ID NO: 11073 - protein, 376 aa, Triticum aestivum
  Clone ID: TRIAE-23APR03-C98_888.p
MLGAARRQLGSGPMLGQLLRRLRPAAAASTEAARGYSSAAKEITVRDALNSALDEEMSADPSVFLMGEEVGEYQGAYKITKGLLDKYGPDRVLDTPITEAGFTGIGVGAAYQGLRPVIEFMTFNFSMQAIDHIINSAAKSNYMSAGQINVPIVFRGPNGAAAGVGAQHSQCYAAWFAHVPGLKVLAPYSSEDARGLLKAAIRDPDPVVFLENELLYGESFPVSDEVLDSSFALPIGKAKIEREGKDVTITAFSKMVGYALQAAEILSKEGISAEVINLRSIRPLDRAAINASVRKTNRLVTLEEGFPQHGVGAEICMSVVEESFEYLDAPIERIAGADVPMPYAANLERLAVPQIEDIVRAARRACYRALPMTATA

SEQ ID NO: 11074 - protein, 645 aa, Triticum aestivum
  unsure (1)..(645): unsure at all Xaa locations
  Clone ID: TRIAE-23APR03-C98_900.p
PSFLLRLPLLFLLRRKQAGTGRHSDLSAPSSPRAPNPPLVNVAPPEERTSDGIAWPRARPPALLLLLALAVAGVLSDGSDHRYKLGDPVPXXXNKVGPFHNPSETYRYFDLPFCSPEKVKEKSEALGEVLNGDRLVDAPYKLDFRTDHDSKAVCPKKLTKEDVAKFRNAVAKDYYFQMYYDDLPLWGFIGKVEKGGKPDPSEWKYYLYRHIIFDILYNNDRVIEINVHTDQSALXVDLTEDKEVNVDFLYTVKWKETPTPFEKRMEKYSSSSNMPHHLEVHWFSIINSCVTVLLLTGFLATILMRVLKNDFVKYAHDEEAADDQEESGWKYIHGDVFRFPKNKSLFSAALGTGTQLFALTTFIFLLALVGVFYPYNRGALFTALVVIYALTSGIAGYIATSFYCQLEGMNWVRNLLLTGCLFCGPLFLTFCFLNTVAIAYSATAALPFGTICVIVLIWTLVTFPLLVLGGIAGKNSKSEFQAPCRTTKYPREIPPLPWYRTTVPQMAMAGFLPFSAIYIELYYIFASVWGHRIYTIYSILFIVFIILLIVTAFITVALTYFQLAAEDHEWWWRSFLCGGSTGFFVYGYCLYYYYARSDMSGFMQTSFFFGYMACICYAFFLMLGMVGFRAALFFVRHIYKSIKCE

SEQ ID NO: 11075 - protein, 270 aa, Triticum aestivum
  Clone ID: TRIAE-23APR03-C98_918.p
MLRVAGRRISSHLAWRPAAAASAGSSPLAGGLPGDDFPRDQNPRFAIESPFYVAARGFSAESLVPRNQDVELAELTPTTAALKNPCAKIVYDEYNHERYPPGDPSKRAFAYFVLSGGRFVYASLLRLLVLKFVLSMSASKDVLALASLEVDLSSIEPGTTVTVKWRGKPVFIRRRTEDDVKLANSVDVTSLRDPQEDAVRVKNPEWLVVIGVCTHLGCIPLPNSGDFGGWFCPCHGSHYDISGRIRKGPAPYNLEVPTYSFLEDNKMLIG

SEQ ID NO: 11076 - protein, 103 aa, Triticum aestivum
  Clone ID: TRIAE-23APR03-C98_923.p
MSTVTRAYLDQRLALANRCSREAAMAGAKAAAVATVAAAVPTLASVRMLPWARAHLNPTGQALIISTIAGMAYFIVADKTILSMARKHSFDDAPDHLKNTSFN

SEQ ID NO: 11077 - protein, 586 aa, Triticum aestivum
  Clone ID: TRIAE-23APR03-C98_925.p
MALSCMRCPAAAAGGGPLARRPQPPPSSSLAFSFARCGAAKGWRIHAVAGKGVKAPMDAVENAVAPAAPSTVANGTSSAITVEEFEDLASLVKDDEASVSITVVGASGDLAKKKIFPALFALYYEGCLPKHFSIFGYARSKMTDAELRDMVSKTLTCRIDKRENCSEKMEEFLKRCFYHSGQYDSEEDFRELGKKIKQHEGPRVSNHLFYLSIPPNIFLDVVKCASKSASSVSGWTRVIVEKPFGRDSESSAALTKGLKQYLTEDQIFRIDHYLGKELVENLSVLRFSNLVFEPLWSRQYIRNVQLIFSEDFGTEGRGGYFDSYGIIRDIMQNHLLQILALFAMETPISLEAEDIRNEKVKVLRSMKPLRLEDVVIGQYKSHTKGGITYPGYTEDKTVPKGSLTPTFAAAALFINNARWDGVPFLMKAGKALHTKQAEIRVQFRHVPGNLYKGSFGTDLDRATNELVIRVQPDEGIYLKINNKIPGLGMRLDRSNLNLHYAARYPKEIPDAYERLLLDAIEGERRLFIRSDELDAAWELFTPLLKELEQKRMAPELYPYGSRGPMGAHYLAAKYKVRWGDLGGSEH

SEQ ID NO: 11078 - protein, 388 aa, Triticum aestivum
  unsure (1)..(388): unsure at all Xaa locations
  Clone ID: TRIAE-23APR03-C98_941.p
MALQLLPSTLSVPKKGSSMGAVAVKDTAAFLGVSSKAKKAXLAVRTQVATAPSPVTTSPGSAAAKPSGKKTLRQGVVVITGASSGLGLASAKALAETGKWHVVMACRDFLKASKAAKAAGMADGSYTIMHLDLASLDSVRQFVDAFRRAEMPLDVLVCNAAIYRPTARTPTFTADGHEMSVGVNHLGHFLLARLLMEDLQKSDYPSRRMVIVGSITGNSNTLAGNVPPKASLGDLRGLAGGLSGTSGSAMIDGDESFDGAKAYKDSKVCNMLTMQEFHRRYHEETGITFSSLYPGCIATTGLFREHIPLFRTLFPPFQKFITKGFVSEAESGKRLAQVVAEPSLTKSGVYWSWNKDSASFENQLSQEASDPEKARKVWELSEKLVGLA

SEQ ID NO: 11079 - protein, 377 aa, Triticum aestivum
  unsure (1)..(377): unsure at all Xaa locations
  Clone ID: TRIAE-23APR03-C98_955.p
MATMNPFDLLGDDEGDDPTQLLAKAAALAQKAEAKKAAAPPAAGKGGAKTVANLPTKPPPPGQAGNDSRGGGPPSXRGGYGRGERGSGRGGRGGYGQNRDYGSEDTNGYRGGYGARTGGEEGAQDRERAPRQPYQGGGRRGGYREGEFGDDSERPPRRNYERHSGTGRGYEIKREGAGRGNWGTTSDEFVARETEALKQDEKAPAPEKQGAPEDAPQADENKPTKDGATVVEEEKEEDNEMTLDEFEKVMEEKRKALAALKKSEERKVEIDKDLQAMQLLSTKKGNDEVFIKLGADKEALKKKENAEREERAKKSVSINEFLKPAEGERFYGGRGRGGRGRGDRGGFRGGFGGGGYHGPPPAPAIQDQNQFPTLGGK

SEQ ID NO: 11080 - protein, 376 aa, Triticum aestivum
  Clone ID: TRIAE-23APR03-C98_963.p
MATVNPFDLLGDDEGDDPTQLLAKAAALAQKAEAKKAAAPPAAGKGGARTVANLPTKPPPPGQAANESRGGGPLSRGGYGRGERGSGRGGRGGYGQNRDYASEDTNGYRGGYGARTGGEEGAQDRERAPRQPYQGGGRRGGYREGEFGDDSERPPRRNYERQSGTGRGYEIKREGAGRGNWGTTSDEIVAQETEALKQDEKAPAPEKQGAPEDAPQADENKATKDGAAVVEEEKEEDNEMTLDEFEKVMEEKRKALAALKKSEERKVEIDKDLQAMQLLSTKKGNDEVFIKLGADKEALKKKENAEREERAKKSVSINEFLKPAEGERFYGGRGRGGRGRGDRGGFRGGFGGGGYHGPPPAPAIQDQNQFPTLGGK

SEQ ID NO: 11081 - protein, 192 aa, Triticum aestivum
  Clone ID: TRIAE-23APR03-C98_969.p
MSKRAGPPKHQNTYAWKPNLGRKINETEPGGRFRPLSEITGVCQRCRDQIDWKRKYGKYKPIVEPAKCQKCSKRNVRQAYHNVCTGCSKELGICAKCCTSVKQLVGRDAEEANSERKELEEAIRYARERERRTLLRLMNKNKDEESGTSVPKIADRDREGDLFPVASLDEYAEQAVQKDESDEEDARDFVKD

SEQ ID NO: 11082 - protein, 271 aa, Triticum aestivum
  Clone ID: TRIAE-23APR03-C98_974.p
MSLLSKLRLVTVDVTGTLLAYKGRLGDYYCMAAKAAGKPCPDYDRMHEGFKLAYTEMARKYPCFGFAAKMPTIEWWRICVKDSFVKAGYDYDDETFDKVFKRIYSAFGSSAPYSVFPDAQPFMRGLREKGITVGIVSNAEYRYKEVILPALGLNQGSEWDFGVFSGIVGVEKPDPKIYKIALEMAGNVAPEEALHIGDSYRKDYVPARSIGMHALLLDRFKTADAESWRQSGAPVLPDLEAAQAWLTKNPTEEPAEEPLGAALLRRMAEKL

SEQ ID NO: 11083 - protein, 280 aa, Triticum aestivum
  unsure (1)..(280): unsure at all Xaa locations
  Clone ID: TRIAE-23APR03-C98_990.p
MAMARVPILIAVALVAAAASCSAWEPTIRMPTAEAAAAAVDDAVAPLIHALRPLLGSSGELGSRGGVPCDSWRLGVEAYNVRDWKTVPANCEGYVGHYMLGSHFRRDSKVVIDQAIAYVDSLKLAGNGKEVWVFDIDETTLSNLPYYATHGFGARPYNATSFDAYVLEGTAPVLPETKRLYYKLLKVGIKPVFITGRTEDKRAITVGNLRSQGISGWMNLTLKQPGFHGSAISYKSAERKKLQDAGYVIVGNIGDQWSDXLGAPEGARTFKLPDPLYYIS

SEQ ID NO: 11084 - protein, 594 aa, Triticum aestivum
  unsure (1)..(594): unsure at all Xaa locations
  Clone ID: TRIAE-23APR03-C98_991.p
MASPAARAASALLLLLALAVAGVLSDGSDHRYKLGDPVPLYANKVGPFHNPSETYRYFDLPFCSPEKVKEKSEALGEVLNGDRLVDAPYKLDFRTDHDSKAVCPKKLTKEDVAKFRNAVAKDYYFQMYYDDLPLWGFIGKVEKGGKPDPSEWKYYLYRHIIFDILYNNDRVIEINVHTDQSALVDLTEDKEVNVDFLYTVKWKETPTPFEKRMEKYSSSSNMPHHLEVHWFSIINSCVTVLLLTGFLATILMRVLKNDFVKYAHDEEAADDQEESGWKYIHGDVFRFPKNKSLFSAALGTGTQLFALTTFIFLLALVGVFYPYNRGALFTALVVIYALTSGIAGYIATSFYCQLEGTNWVRNLLLTGCLFCGPLFLTFCFLNTVAIAYSATAALPFGTICVIVLIWTLVTFPLLVLGGIAGKNSKSEFQAPCRTTKYPREIPPLPWYRTTVPQMAMAGFLPFSAIYIELYYIFASVWGHRIYTIYSILFIVFIILLIVTAFITVALTYFQLAAEDHEWWWRSFLCGGSTGFFVYGYCLYYYYARSDMSGFMQTSFFFGYMACICYAFFLMLGMVGFRAXALFFVRHIYKSIKCE

SEQ ID NO: 11085 - protein, 218 aa, Triticum aestivum
  Clone ID: TRIAE-23APR03-C98_993.p
MAPRVPSSLLLVGAALLLGLAAGAARASNEEGDALYALRMRLSDPNGVLQSWDPTLVNPCTWFHVTCDSASRVVRLDLGNSNVSGSIGPELSRLVNLQYLELYRNNLNGEIPKELGKLKNLISLDLYANKLTGRIPKSLSKLSSLRFMRLNNNKLAGSIPRELAKLSNLKVIDLSNNDLCGTIPVDGPFSSFPLRSFENNSRLNGPELQGLVSYDFGC

SEQ ID NO: 11086 - protein, 331 aa, Triticum aestivum
  unsure (1)..(331): unsure at all Xaa locations
  Clone ID: TRIAE-23APR03-C99017_1.p
MSLRNPARSACLCRLVQLASDAGTRRVYSTADRRRRLMLKARAGESAEPFIRRLTLGAAPDTNPRPPQRRPPGPPPHASATGASPAATPGRAAXGKQQRPERSAQKAIGESLMEKPKRGDAASSTGSNIEAQQPDHEPGPPLQTEDVDGIFRKMKETGLIPNAVAMLDGLCKNGLVPEAMKLFGLMREKGAIPEVVIYTAVVEAFCKAAKLDDAVRIFRKMQGNGVIPNAFSYWLIIQGLCKGDRLDEAVAFCVEMFEAGHSPNAATFVGLVDAVCKMKGVEEGDKLVRSFQDRNFAIDEKSIREHLDKKGPFSPIVWEVIFGKKKTSRPF

SEQ ID NO: 11087 - protein, 118 aa, Triticum aestivum
  Clone ID: TRIAE-23APR03-C992_2.p
MTGKAKPKKHTAKEIAAKIDAATTNRGGGKAGQKDRLGQEKGGHAKMECPLCKVTAPDVKSMQIHHEARHPKLPFDPDKINNLHGSTAAAPAAAAVASTSKPKPGIRGSLKKTGDEQK

SEQ ID NO: 11088 - protein, 211 aa, Triticum aestivum
  unsure (1)..(211): unsure at all Xaa locations
  Clone ID: TRIAE-23APR03-C996_2.p
ERPAALRAARASLPRWFYQARARRPSGLQRATPALSTSEDLLRAAAQEGMAKAGENSFEDEIMESDXVGLEGEVVEPDNDPLQKMGDPSVEVSEEMRDKAQLYKKKGVDALSEGKLDEAVEHLTEAILLNPTSAILYAARAGVFVKMKKPNAAILDAEAALQINPDSAKGYKSRGMAKAMLGKWEDAAHDLHLAAKLDFDEEISSELKKVM
